United States Patent Application Publication US 2026/0191916 A1 - sequence listing, part 93

SEQ ID NO: 608 - DNA, 3931851 bp, Bacteroides caccae (residues 1,965,927-3,931,851 of 3,931,851)
  source 1..3931851: mol_type = genomic DNA
attcaatacagcttggctgtatattattgcgcctaaacattctttttggttttggacggagaaaggaggtcccgataatgcttatgaactcccaaccgactttcttgaatataaagggaaatttatattcttttatcttaagaataaaaagcggttgagcgaggaattccttgataaaacaatgaggcaaaaaaaaggggaaaattatatagaattggacacgcacacacatatggatacttgtggtatatgggtgtattttaaagataaatattcggatagatctgcatatgtacattgcggcgatcgtcagcccttttctgcataccctgaattgcgttacttcttatgtaatgaacaggattcatccgtttattattctcatattattgatatgcgaatgtggaagccatatatatatggaacggaaaccaaaaacggaaaatttttgaatcccaatcaaatagaatttagcgtgaaaatatgtaaccgtacagattctgcactttatataagtacgcgaccggaagagtatggtcattttgtttttaaagatggtgaaaactctttaactttccatgtaagcgatgcggaaggtgttgctgaagtatctcccggaatgtatgaaataactccccataccgacattgtcttagacttatccacagaaaagaatcctattgtatttaagaatgttcctcggaagaaatatccggagaaaatacatcaaatggtttatgattccgtatattaccttccgacgcatactgtaccccaaagcgagaaaaggtatatttggaataagaaatttaaggtttaccctctttatcttaattcttattattaccgtatagatagtgtggaacatactgttttttgggatggagaaatagacgaaattatcggaagaaagtttaaaaggtgaagtacccttccggttcctatgttgtccgcaggggtttataagcaaatattaaagtcggcacaggagtattatgtgcacagcaacgtctgttcgcgtttcgcgtatgaggcttcccaccgtaatttgctgttaaaagagtttggtgtttgtgcctcctccgggttaccaggatcatccggatctggatctttatgcttacatatatcgttatgactatctggatcgtcttgtttataagaagcttcccggttgctccccttcttacctggtttatgatgcggtacaccgtttgtttttttctcaggatggctgtcagcgtaatgattctctttggtcattctttgtttatgatgtctatgggcgtgtcgttgtggagggcgaatgtggcaacagcgataaacatgttcggactgccggtgagacagttgttttaggtactcttatggaaggcgacaccggcctggcgtacagtggttatcagagttcttttgatctggttgatccttgtgtatatgtggtgaactactatgatacgtatgattttagaacacgaaacggcttttctgcatataattttccggaaggaactgtgagtgcgatcggtaatcttacgggtagcatattttgtacacatggttcttcgggattcatttattctgcggactattatgacagcaataagcggatagtgaaaagcctgtcaagtcgtgtcaatggaggcatggatacatacgccactgagtactcctttcaaggaagtcctctgtccgtccttcacacccatacggatagttccgggtattcattgacggaacgttatacctatacttatgaccattcgtcacgcctgacacgagtgagccaccaatacgataacaatccttccgtcttgcttttggaacacacttatgacgagttgggccgattgcagacagacaaactggataacggtatttatgcaacaggctatgcctacaatatccgtaactggctgaccggtattgaaggcagtaagtttagccagtctttgcattataccgacggtttgggagtcccttgttataatggtaatatcagcagtatgacttggaaaagtggagccggggccactccccgcggttataaattcagttatgaccgtctgggtcgcctgactgatgcggaatatggtgaagggccgagcctttctgtaaatactaaccgttttaatgagcaggtgacgggctatgataaaatgggtaatatcttgggtctgaagcgctacgggcagacttcagcgacgggttatgatgtgattgatgatctttctttgagttatgccggtaaccggttaaagaaggtggcagaccgttcaggcacttctgccttcaataacggcttcgagttcaaggacggtattgatttgtccacagaatatgaatatgatgaaaacggcaacctgactaaagatttaaacaaaaagaaaactgctattcagtataattgtttaaatttgcctagtcgtgtaatgtttgcgaatggtaacagtatatcttatctttatgatgctgcgggtaggaaactccgtaccgtgcactttctggaaggagacagtgttacaacggattactgcggtaatgtggtctatgaaaatggagtacctcagattctattgacggaagtcggttatgtgtcccttactgacggtcagtatcattattatttgaaagatcatcagggtaataatcgtgtggttgttgctgaggagggaacggttgaggaagtgaacgattattatgctttcggcggattgatgcaacaagttcccggcagagcgtccagccttataagtataatggcaaggagttggatcgtaaaggtgggttggactggtatgattatggagcgaggatgtatgatgctgcattagggagatttatgaaaactgatagatttcagagaagtatgtttctttatcaccttatcaatatggtgcaaataatccggtgaataatattgatgtgaatggagatagtatttggtatactcggaatggtgatattgtcactatgcatgtaactgcaaagatatttaataattcaagtgataatataaatatggctagagctgccaaagatatagtttctgatataaaaagtacttatgaaggaaaatttgaatggagcgataataagacttacaatttaaaggttgatatggatcttaaagttgcaacttctatgaaagatgtcgaaaactctgatcatttatttgtattagcagatagcgatagtaaaggagcgcgtggagcaacaagtatgttaggtggaaaggttatgactttggcttcaagcgattttgctaataataattggttgtcgaataatttgtcttataataaaacttttacagctactcatgagtttgggcatgcaattggattatcacattcgcagaatccatttaatataatgaagcagggaggagttgttcacaacagcaatagcaaccaaagagttatcatgttgcagcaacaaaataatctaaataataatcttgttgtcgatatatataatttaggtcttaaatggcgataatgtagatgaaattatgaaagggaaaaaaaataataacgataggaataatattatgtgtgtgttgtgtgtgtgttacatccagaactgcgttaatatttgtaggtaactcttatgaaaatagcaaagaaattaatgttactatttcggtggatgataaggtattatataatggctttttaaaagcttatgagattccaatgctgttggaaaagaagaaaatgagggtcggcttttacaaggtttctgcgaaatgtaataatatccaagtgcagcatagattcttttatttttttcagaaaactatttggattgattttgattttgcaactaatgacatattattagtttcgaaattttataaacaaataccattataattttatgttatctgtcttatcgtaatataaagttaataaaacagtcttgctctgatatataagttgtctaaactaaatcagcatattagagcaagattattttgtatgatgcagctattggatgttggtatgtagtagatccggagtctgagagatatcattcgttaaatcctaacaattactgtgtaaatctctagagaagggcgggttagtacaaatagtaagatgcccttttatatttcaaaaagctagtataatctaactgatattttattttttttcttctcgatagcctatttctatatgcaattctcccctttttctttcttttttctcataagaaagaatatatttgtacctaagttaaatgaaaaccagcgtatgatatgataacaacccagttgcttcgccctgaaagtattgttgtagtaggggcttcgaataatgtacataagccgggtggcgcaatattaaagaacttgataaacggaggttatcagggagaacttcgggcggtaaacccgaaggagaaggaagtacaaggagttcccgcctttgcagatgtgaaagatcttcctgatacggatttggcagtattggctgtgcctgccggactgtgtcccgatattgtggaaacattggctagtacaaaacaaactcgggcgtttatcatactctctgccggatttggagaagaaacgcatgaaggggcgctattggaagaacgtatcctggaaactgtgaataaatacggcgcttcgctgattggacctaattgtatcggtttgatgaatacctggcatcatagcgtgttcagccaacctatccctaacctgaacctgaaaggagttgatctaatctccagttccggtgcaacagcggtgtttattctggaaagtgcggtgacgaaaggattgcaatttaattctgtctggtcggtaggtaatgccaaacagatcggtgtagaagatgtcttgcaatttatggacgagaactttgatcccgagaaagattcacatctgaaattgctttatattgaaagtattcagaacccggacagattattgtttcatgcttcctctttgataagaaaaggatgtaagattgctgctatcaaggccggaagttcggagagcggaagccgtgcggcatcttctcatacgggagcgattgcaagttccgactcagcggtagaggcgttgttccgtaaagcaggaattgtgcgttgtttctctcgcgaggaactgacgaccgtaggttgtgtatttactttacccgaattgaaaggaaagaattttgccattatcactcatgccggaggaccgggggtaatgttgacagatgcgttgagtaaaggcggtttgaacgtaccgaagctcgaaggcgaattggcggaagaactgaaaactcaactttttcccggtgctgccgttggaaatccgatagatattctggctaccgggacaccggagcatttgcgtctctgcattgattactgtgaagaaaagcttgaaaacatagatgccatgatggctatcttcggaactccgggattggttactatgtttgaaatgtatgatgtgcttcacgagaagatgcaaacttgcaagaaaccgattttcccgattcttccttctatcaatactgccggagctgaagttgcagcgtttcttgctaaagggcacgtgaactttgccgatgaagtgacactcgggacggccctttcgcgtatcgttaatgctcctaaaccggctgttcctgaaatagaattgtttggagtggatgtcccgaggattcgtcgtattattgattcgattccggaagacggatatatcgagcctcattatgtacaggcattgctccatgcggcaggtatcccgttggtagacgaatttgtttcggataataaggaagagatcgtagccttcgcccgccgatgtggattccccgtagtggctaaggttgtcggtccggtgcataaatcggatgtcggcggagtggtgctgaatattaaaagcgagcaacacttggcgctggaatttgaccggatgatgcagatccctgatgccaggtcgataatggtgcagcctatgctgaaagggacagaactgttcattggtgcgaaatatgaggagaagttcggccatgtagtgctttgcggtttagggggtatttttgtggaagtgctcaaagatgtatcttccggtttggctccgctttcttatgaggaggcttattcgatgattcactcattgcgcgcctataaaatcatccagggaacgcgaggccagaagggagtaaacgaggataaatttgctgaaattattgtccgtttgtctaccttgctccggtttgcaacggaaatcaaagaaatggatatcaatccgcttctcgcaacggaaaaggctgttgtggccgtagatgcacgtattaaaatagagaaataagactattttttcattcattgggacgtatcttctatttttcgattgttatttcacctacatttggtaagttgaataaaagaagtgttataaaccgaatatatgaaaaaaattataataacgtttatttctttaataattggaattcttagccgtgcacaaacggttaatgaacattattattttaagaatcttagtagccagaatgggttgtcacaaaacacagtcagtgctatcttgcaggactcgaaaggttttatgtggtttggtacgaaagatggattagatcgatatgatggggtatctttccggcattttaagtacgatagaaacaatccgagaagtctgggcaataattttgtgacttctctttatgaagatatcgaaggtaatatctgggtagggactgatgtgggagtctatatctattatccggagaaagatacttttcgtcattttgtagaacagagtgacaaaaacacaagggtggaacgagccgttgctatgatttcaggagacagtcagggaagggtatggatagctgcagaggcgcaaaacttgttttgttatgatttgaaaaagcaaaccttgagaaactatattctgaccgatcatccattggtctctaccaatgtgaaatgcctgacggttgataatagtggtactatctggattggcttctacggtgacggattgttttattcgaaagatgagttgaaaactcttcatccttatatatcacctattgataatgaggaaacttataataatgacgttgtgagtgaaatactcccgggagcatacaattgtttatatattggttctttaaaaggaggagtgaaagaattgaatctgacttcgggtaaattacgggatttgttgttgaaagatgaagataatgaatccatctattgtcggacattactttttgctacggataatgagttatggataggtacagaaagcggagcttatatttataatctccgtacggggaagtatacgcacttgcgtagttctgagtatgatccctattctttgtctgataatgcaatttattctttttgcaaagaccgtgaagatggtatatggatcggttcgtattttggcggagtaaactattatccgcgctcgtatacccattttgagaaatattatccgaaaggagaggaaaatagtctgcatggtaagcgggtacgtgaattttgtcgtgataactatggtgtgttatggattggtacggaagatggcgggttgaaccgttttaatttgaatacaaaagaattttctttttttgctcctagtgcgggatttaccaatatacatgggttatgtttagtggacgataaactttgggttggcacattctctaaaggattgaagattatagatacccgtacagggactgttttgaagacatatcagaagaacagctctccccgttctttgattgataatagtatttttgcaatttgtagaaccgccacaggtgacatctacttaggaacgatgttcggactggtcaaatataataagcaatcggacgattttgaccgtataccggaattgaatgggaagtttgtatatgatataaaggaagattccggcggtaatatctggttggcaacttatgctaatggtgcttattgttataatgtgaacgatcggaaatggaaaaactatgtgcatgatgaaaaagataccacaagtctttcatataataaggtttctagtatttttgaagattcctatcaccggatttggttaacaactcagggaggaggtttttgcttatttcatccggagtcagagacgtttactagttataactcaactgacggactacctagcgatgttgtttatcagattgtagaggataaagatggacagctgtggctaacaactaacaatggacttgtctattttcagccaaaaactgaaacgatgaaagtatacactactgccaatggtctgttgggtgatcagtttaactatcggtccagttttgaagatgaaaatggaatgatttattttggtggaattgatggttttatagcttttaatcctaaaagcttctcggagaataagaatcttcccacagtagtgattacagatttcttgctgtttaataaagaagtgtatgcagatgaacctaattcgcctttggaaaagaatatcactttttctgataagatagtactccgggctgatcagaattcattttctttccgcatctcggctcttggttatcaagctcccggaatgaataaactgatgtataaattggaagggtttgataatgagtggttatctatcggtgagagtccgttgataacctatgctaatctgcgttatggtgattatgtatttcgggtgaaagctgcaaatgacaatggcgtttggaataataatgaaatctcgttgagcatccggattttacctcctttctatctgtcaatttgggcttattgcatttatatacttttgattattggatgttccgtttatttgattctttatttaaaacgccgtagtaatagaaaacatcatcggcaaatggagaaatttgagcaggagaaggaacgtgaaatatattatgcgaaaatagatttctttacgaatgtagctcatgagatacgtactcctttgacgttgattaatggtcctctggagaatattcttctgaaaaagacggtggatcctgagatacgggaggatttgaatatcatgaaacagaatacggaacggttgttaagtttgacgaaccagttgctggatttccgtaaaacagagagtcagggattccgcttgaactttgccgagtgtaatgttactgaggtactgaaagaaacttataaccgttttacatctttggcgagacagagagaactggactttgtattgaatgtaggcgaacaggacttctatgcacatgtcaataaggaagcatttactaagattgttagtaatttgttgaataatgctgtgaaatatgcagaaacatatgtacatgtgtttttggaaatgaacgggataggagaaaagaggatgttttatattcgtacagtgaatgatggcgttatcatcccgaatgaaatgaaagaggaaatctttaaaccttttgtccgtttcaatgaaaaagaagatggtaaagttaccacaggaacgggaatcggattagctctctcacgttcattagctgaattacatcagggaagtttgatgatgttggaaggtgaagaggcaaatgtgttctgtctgtcgcttcctgtggaacaggatagtgtaataaagctgacttcggaatataaatccgtagaagaggagaatgtggtggaacggcggacggaactagcggacagcaggggagacaaaccggtagtgttggtagcggatgataatccggatatgttgtctttcattgtttgtcagttggaaagtaattatgtcgttgtgactgccaatgatggtgtggaagcattgaaagtattggataatcaggaggtttcattagtggtaagtgatgttgttatgcctcgtatggatggatttgaattgtgcaagttgataaagtctaaattggattatagtcatattccggtgattttgcttactgctaaaacgaatattcaatcaaagatagaagggttggaattaggggcagatgcatatattgaaaaacctttttctgttgggtatttacaggcttgcatcgccaatctgatcaatagtcgtgaaaagttgcggcaagcttttgcccaatctccttttgttgcagctaatacgatggctttgacaaaagctgatgaggagtttatgaaaaagctgaatgaaatcattcagaataatttgcataatccggattttagtatggatgatatagtagactctttaaatatgagtcgttctaatttctataggaaaattaaaggtgtacttgatttaagtccgaatgaatatctacggttggaaagattgaaacgggctgctcagttattgaaagagggaaatgggcgggtaaatgaaatttgttatatggtaggctttaattctccttcctatttctctaaatgttttcaaaagcaatttggtgtactccctaaggagtttgccggttaagtttattatttggttctcacaaaagtattggtgttgtatatagatatctgcagggtacatatcctgcagatcgtagacttatgtgcttgatagatagagggattagagcgttgtaataatgaagcggaggagctctatatctttctaaaaaataggctaatatgataatttatgggatatttgttccatttatatttcatttgaaacgaatttgctattctttcttttgtttgagacagtattgcgatttattgggatatttattttatcaggaaatcctctcatccgttaattttgcctatgttaatcaatcaaaaatactatgataaaaccattgcatcaattaaagaagctttttatcctttgtgggcttcttatcaactggtatcgggaatatttataatgaaataacctttttattaataattatgaaaacaaaaacaagagatctaagcacatgcttaaaaaggcggttgtggattgtaggtgtatgtctgacgaccttttcttttctttctgtatctgttgcatatgcagtcagtgataatcagactgtccagcagcaaaaaaaaggaatggtgattaaaggtaaggttttgggtacagacggtgaacctattatcggtgcatctgtattggtgaaaggctctactactggagttgttactgatttggatggtaactatacactgtctaacgtttctaaaggagctattttggaatttagttatgtaggttatgtaaagctgactaaaaccgtaggaaatgaaacaaccataaatgcaattctgtatgaggactctcagatgttggagggagttgaggttgtggcttttggcacacagaaaaaggagagtgttattggtgctatttcaaccgtgaaagtggcggaactgaaaacaccctccagtaatcttacgaatgcacttgccgggcgtattgcaggagtaatctcttatcagagaactggtgaaccgggggtggatgacgcctctttctttgttcgcggtgttacaactttcggatataaaaaagatccgttgattttgattgacggcattgagttaacttctaccgatctggctcgtttacagccagatgacatcgccagcttttctattatgaaggatgctactgctaccgctctttacggtgcccgtggtgcaaatggtgtgattctggtgaaaaccaaagaaggtcagaagggaaaagcacggttaagcttaagagttgagaactcaatatccactccgactcaagagatagaattggcagatcctgttacttatatgcgtctgcacaatgaggcctatttaactcgtaatccgttggcgccgttgatgtattctgaggaaaaaatagacaatactgtaccgggggcgggatctgtaatttatccggctacggattggagaaaggaattattaaaagattttacgatgaaccagcgcgtcaacctgaatattacaggtggtggtgatgtcgcacgttactatgtggcagcttcgtatagtcaagacaatggtattctggaggttgataagaacagtaattttaataataatatcaaacagagagtttatactcttcgttctaatgtgaatatcaacgctaccaagacaacagaattgattgtccgtctaagtggtgtgttcgatgattataacggaccgttatatggtggttcggctatgtacaatctgattatgaagagtaatccggtattgtttcccgctaaatatcccaaagatgaagctcatgcatacacgaaacatactttatttggtaatgctgaaaatggacaatatttgaatccgtatgcagaaatggtaagaggatataaagaatccggccgttctaatttgagtgcgcagtttgaagtgaaacaggatttgaaattcttgacggaaggtttatcggcacgcttgttgtttaatacttcccgtatctccagttatgatgtttcacgtaaactgaatccatattattataagatgactaattatgattatctgaccggtgattatgccattgatatcattaatccggatgacggttcggaatatctgatttatgatccgggtggtaagagtattacggctaatatgtatatagaagctgcattgaattataatcgtgatttcggaaaacatggagtaggcggattattagtctatcagttgagaaataaccttcagccgaatgcaggctcgcttcaggcatctctgccttaccgcaatgtcggtttatcggggcgtttcacttatgcatataataatcgttattttgcagagttcaacttcggttataatggttccgaacgcttccataaaagtaaacggttcggtttcttcccttctgccggtttggcatgggttgtttctaatgagtctttttgggatccatttaaagatgtagtatccaagttgaaattgagagcgtcttatggtattgttggtaatgatgctatcggaagcgggcgtttcctgtatttgtcggatatcaatatgaatgatagtaagtatggggcaaacttcggatataattatgattatcatcgggatggtatttcggtaaagcgatattctgatcctgaaattacatgggaaaagtctgctaaaacaaactttgcacttgagttcactttatttaatgatttgaatgtgacggcagagtattatacggaacgccgtaagagtattttgcaacaacgaacttcgatcccggcatctatgggactttgggtacaaccttatgcaaacttgggagaggccaaggggcacggagttgacttatcgttagattataataaatatttcgccaataaatcatggttgcagttgagaggaaactttacttatgcgacaagtgaatatatggtatatgaggattatgaatatccgggagcatggtggaaacagaaagtgggttatccaactaatcagacttggggatatatagcagaaggtctatttgttgacgacaatgaagtggctaattctcctgtgcaatttggagaatatggtgcaggtgatattaagtatcgtgatgtgaacaaggatggtaagattactgatctcgatcaggtacctatcggatatccgaaagaaccggaaattgtatatggttttggtgcctcttatggatataagaattgggatatatcagtgtttttccaaggattggctagagaatcattttggattgattataataatgtatctcctttttttaacacggttgatacaaaagttgtaggtaatagagttgggcataatgcacttgcaaagtttattgcagatagtcattggtcggaggataatagagatgcttatgcggtatggccgagattaagcccgacttctattgagaataacagtaaaacgagtacttggtttatgcgtgatggttcgttcttgcgtttaaaacaattggagattggttatactattcctgaaaaagtgactaataaagtaggaatcaagaaccttcgattctatgttacaggaaacaatctattatgctttagtaaatttaaactttgggatcctgaaatggcaggttccggcttaggttatcctgtacagcgcgtgtataatataggactaaatttaactttctaaatttgatataaaatgaaaaaaatacaactgtttatattaaattgtttgattatcgctttatcttcatgtgattcattcttggatattgttccggatgatattgctacaatcgataatgcatttacaatgagggcacaggcggagaaatatttgtttacctgttattattatcttccggctcatggcctgttggaggcaaatccggcaattgccggtggtgacgaactgtatattacggagtcttttcgtagtgcagcacacgtacatgcatggtatatttcacataatatgcaaagttcggcaagaccacgctgtgattattggaccggagccgatcaacagaataacaaatcattgtatcaaggaatcagtgactgtaatatctttctggagaatattcagaaggtacctgatatgacacaagcagagaaagaccgttgggcggcagaagtacgtttcttgaaagtctattaccattattggctgattagaatgtatggaccaattcctattatggatcggaatattccggtaaatgcaagtgaggatgaagtaaaggtttttaggagtactatagacgaatgctttgattatgtaatcaattctttaaccgagattatcaacagtaatcatttgcctgataagataatgaatgaggctgaagagttgggacgaattactcaaggaattgcaatggcaataaaagccgaagtgatggtaactgctgccagtcctttatttaatggaaatgctgattataaaggatatactgattccagaggtattgaactattcaatccgaataaatcggaacaggccaaaaaacagcgttggatagatgctgcggaagcttgtaggcaggctattgattttctgaaagctcagggacatgatttatataaatatacttctcttgaatacacaatatccgatcagacccgtgcgaaaatgaatattcgtaacattgtgacggaaaagtggaatcaagaaattatttgggctaattcaaatagtattatcggacagttacaggatcatgctattccacgtggattggaaccgggaaaagaaggaaatgcgagtgttggtggtaatttggctgtccctctaaaaatagcagatttgttttatacaaaaaatggagttcctattacagaagataagacatggaattatgatgatcgttttgaattgagaaaagcaacagctaatgataagtactttatcaaggaagggtatacaacagctaatctgaattttgacagagaagtacgctattacgcaagtttaggatttgatggtgcagtctggttcgggcagggagtgacagatgagacgaaaccgatttatgtgcaatgtaaacaaggacagtctgctgccaatcagattgcgaattcatggaatgaaacaggtatatggcctaaaaaactagttcattttaagagtgtggtagggcagaccagtggttttactaagattacatatccgttcccagtgatgagattgggtaacttatatctgttgtatgctgaagctttgaatgaaagtggtgctactaaaactgatgttctgacttgggtcgatttgatcagagaaagagcaggactgaaaggtgtggaagaaagctgggatacatatacgaacaataagaaatatgaaacaatagatggcagacgtgagatcatacaacaggaacgtggaattgaattggcattcgaagcacagagattttgggacttacgtagatggaaattggcatttcaggaacagaataagccgataaccggttggaatactcagtatagtacaaatgaagattactatacagaacaattgatttatactcaagagtttagaataagaaactatttctggccgattttagataaggaactatattcgaataaaaacctggtacagaattatggttggtaaacttttaaataaaaacgttatgaagaagaaattttataaatatgggttgttttatataggagttgttttggctgcttgtgccgacaatgctgatctgaacgaacctacgggaagtacgacaccaccgtcacaggtgttgaatgcgacggtaaagaatctgcctggtgcagcaattatctattatgatttgccggatgatcaaaatttaaaatatgttcgggctagctataaagttgataatatgattcgtacagttaatgcttctttctatacagattctttggtagtagaaggattccctactaaaggagagtatgacgttgaactttattccgttagttatggtgaggctgtctctactccgcttgtggtaaaagtaagtccggatactcctccttatcagaaagtgcgtggaacattaatttcagctgaaacatttggcggtatcaaagtgaactttgataacccggaaaaggctaaattgggactgggggtcataaagaaacaggcagaagggatttggacacaggtatatatgcattatactgaggctaaaggtggtgatttctatgtacgcggcctggatgctgttactacagattttggtatttttgtcagagatagatggggacatctttctgatacattgtatgtcaccgagactcctttgtatgaagaacaatgcgataagtctttgttcaggaagatggctttgccgactgactcttatgagtgccactcatggaatgaagtgacgaaaggaaatgatatgacgcggctttgggatggaatcacagatacagatccttgttttcaaaccaagacgacaacagtaatgccgcaatggtttacctttgatatgggggaaaagtataaattgagccgatttgtgatggtttcacgttattatccgggtaagtatggtaatacatttaaagcaggacacccgaagcattttgaactgtggggtagtaatgaaccaaatccagatggtagctttgatgattcttgggtattactttctgaatatgagtcggtgaaaccttcaggaggtggtgtaaacgatgctcttacaacagaggatcaggaagctgcgaaaaatggtgagaattttattattcctgataatgctccggctgtacgttatattcgttttaaaacgaatgacacatgggggaaaacacgttatatgcatcttcacgaacttacgtttttcggtgcgaggcataattagtaacaagtaaaagataatgctatgaaactatttaaaaaactgatttttatatttttaagtataggtgccttgatctcttgcgatggtatggatgccacgtataaagagtttatagaagaagggcctattgtatatattggaaaagtagattcactgaaagcttatgcaggacgtaatcgggttatgctcgaatggcagaaattacttgatcctcgtgctaaaacggcaaaaatattctgggaaaacagaacgaagtctactgaattacaattgacagataaagcaactcttactcaggttgtagtagaggatttggcggaaggctcgtatgtctttgaaatctgtacatacgatacgtatggtaattcttctattatgtcggaggttccttgtgcagtatatggtgatgtttatgaaaaattgttgttcaatacaaaagtaaagacggcggttttaaagaatgatgtattgaccgttacttttgcagcttcgcttgaaccaactttttttgcttctgaaattacttatatgagttctgaggggaaaaataaaactgtgcttttgaaagctcccgcaacacaggtgaagatagatgatttcgcaggagaccatatcacttatcgttccgtttatttgccggaagaaaccgccatagattatttttatagtgagtcggatgagcttgaaatcaattaaaagaaatagcagagataacaaaaaggatttataaggtcatttttcttactatagaattatatgaaagccttgtatcttttgtagtaacgggtactacaaatggtacaaggcttttttttatgctatatgcatcaattatcccattcatgtttcatttgtctatatcattttattttgagacgtttttgtgatttattgggatgtttatatcatctatatattgtgcgaacctctaattttgcctgtgttgattactgcaaatgataaaactagttatatatgataaaacaattattttcaataggaatagctctgtcattattttctcagatgttatgggcacaatggacccctgtaggagataggatcaaaacttcttgggcggagaagatagatgtgaacaatgtattaccggaatatccgcgtcctattatggagcgttctgagtggtctaatttgaatggtttatggaagtatgcagttttaccgttgggaaaatcaattccggattcttttgaaggtgatatattagtaccatttgctgtcgaatccagcctttcgggagtcggaaagacattgggagaagataaagaattatggtatcagcgtgagtttgttataccctctaaatggagaggaaaaaggattttgcttcattttggagctgttgattggaaaactgaggtatgggttaacaatataaaagtaggagaacatacaggaggatttactccgtttacatttgatataacccaagctttgaagaactcggaaaataatttggttgtcaaagtgtgggacccgacagaaaaaggtacgcagccacgcggaaagcaagtgagtaatcctcatggtatctggtatacgccggtgagtggtatctggcagactgtatggttggaaccggtgtctgaacactatattacagatataaaaacaacacctgatatagatttgaataaggttaaagtaaaggttgaaacagatgacaataggtattcagataaatttgaggtaaaagtgtttgaaggagggcgtctggtggctgtgggaacatcaattaatgggttaccagttgaggtttccatgccggctgatgccaaactttggtcgccggatgaaccattcttatatcagatggaagtttctttatttgagggaggaaaacgggtagactgtgtaaggagttatatggcgatgcgtaagtactctatgaaaagagacaaaaaaggtattgtgcgtttacagttaaacaataaagatctgtttcaatttggtccgttagatcagggttggtggccggatggattatatacagctcctacggatgaggcattgtgttatgatatcaagaaaacgaaagatttgggctttaatatgataagaaaacatgtaaaggtagagcctgcacgttggtatacatactgtgatcaaatgggagtaattgtttggcaggatatgcctaatggtgataaaaccttggagtggcagagaaagaagtattttgatggaacggaactggcacgttctcctgaatctgaggctacttatcgtaaggaatggaaagaaattattgattatctctattcttatccttgtattgggacttgggtgccctttaatgaggcttgggggcaatttaagacaagtgagattgcagaatggaccaaacaatatgaccctacacgtttggtcaatccggcaagtggtggaaatcattatacttgcggtgatatgcttgatttgcataattatccggggccggaaatgtatttgtatgatgcacaacgtgctacggtactaggagaatatggggggattggtttggttttgaagaatcatctttgggaacccaaccggaattggggatacatccagtttaatacatctacggaagctactgctgaatatctgaagtatgcagaaatgctgaaagaaatgataaagcaaggcttttctgcagctgtttacacacaaacgacagatgtagaagtagaagtgaatggactgatgacttatgaccgtaaagtaataaagctggatgaagcaacattgaagaagatcaataatgagatttgtaaaacgttaaaataacaaatatagagattttatatttaccatgagaaaaatacttattttggtttttagtcttttttcgatattctctacagtagaagcgaaaagtaagaagggacaagatcgtgtgttaattgataaagttgccatgtggcaggtaaatcatcagtcaaaagttaaacatcatgatttggcgtggacaaacggagtcttgttccgggggatggtagaatgggcagattatactcaagactcccgttattatgattttctgatgcagatagggaagaagcatcattgggggttcttaaaacgtctctatcatgcggacgatcttgttatagcacagatgtatattcgtatgtatgagaaataccatgatcctgcaatgattcagcctacaattgcccgtgtagattctgttgttgctaaaccttcgaaggcccgtttgtggctcggagcaaagaattggtcggaacgttggtcatggtgtgatgcgttatttatggctccgccggtatacgggttgttgaataagctctatccggagaaaaactatttggcttttatggatagggaatttaaagaagctacagattctttatatgatgcggatgctaagttatactatcgtgatagaagatatattcccaaaagagagaagaatggcgagaaggtattttggggaagaggtaatggttgggtgtttgcaggaatacctttgttgttgcaaactttgcctaaagatcatcctacttatgattattatctgaacatttataaagaaatggcttccgctatagttcagtgtcaggataagaatggttcttggcatgccagtatgcttgatccggattcatatccttcccctgaaaatagtgcttccggattttttgtttatggtttgggctggggagtgaatcaaggaattttgaaagatagaaaatataaaaaagctgcccgtaagggttggaaggctttgaaaagctatgttcatgaagatggcatgcttggatatgtccaaccggttagtgctgctcctgaacaagtgactcagaatatgactgaggtatatggggttggagcattcttgatggcaggaattgagatgttgaaaatgaaatagccttttaataataattaaacttatacgaaatggaaagacattgttttatgaaagtgagaatcttatggttaatcgcttttctgttgtttaccgttcaactgtctgctcaacaaaaagtaacagtgaaaggtaagataactgatgaacataatgagcctgttattggggctaatataatggagaaaggtacaacgaatggagttatttctgattttgacggattttttacttttaatgtttcttccggagctacccttgtagtatcatatataggatttgctcagcaagaaattcctgtcaaagacaaacgcgattttgtaattcgtctggcagaagattcagaaacattgaatgaagtagttgtgattggttatggtagtgctcgcaaaagagacttgactggtgcagtaatgcaagtaaagtctgcgcagttggaaaatgaaagtccttcctccatgcaagacttattaagagcgaatgttccgggattgagtgttggttttagtgcaggtcccaaaccgggtggaagtcttttgattcgtggaaagaactcaattaatgctggaactgatccgttgattgtattggatggggttatatatccgggtgacttggccgatattaatccgaatgatatagaacaaattgatgtgttgaaggatgctagttctgctgctatttacggagcgcgttctgctagtggagttattatcatcactacaaagatgggtaaaagtgaaaaaccgacaattagttttgatgcttctataggtgtagctactcaggctatagttcctgaagtatatcagggagatgagtttactgcttggaggacggatgtctttaatagtgcaaatccgaaccatagaccttatgagtttaatgaccctcgtaaattacccgcagatgtttctattgaagattggatgaaatatgataattcgacgggagatcctgtagagacttggttgcgtcgaattggctttaagaacttggaaatacagaattatttggatggtaaatctgtagattgggccgatatggtttttcaaaatggtcttcgtcaggattataatgcaagtatttcgggaaagacaaaaggggtaaattattattggtctatgggatggacagacaatgagggcattattgtaaataacggatataaatcatttaagactcgtttaaatctggatgccaaaataaataagtttctgactgtgggattaaatgcgcaatttgtacaacgtgatgccagtgctatcggagcggattgggttcagtatcagaagctgactccatatggaagtcctactaatgaagatggaacaatgaagttgaatccgggagatgacacgtcagcgaagcatcctttgatcgattcttattatacagataagagaaatgtgataaataatttgaatgctaatatctatgctaaggtatctttaccttttaatatatcttatcagatgaatttctctccacgatatgagtgggctacagattatgtacataaatcttcggaacatccaagctggaaagattttgggggttctgcttcacgaacttttagaaatgattttctatggcaacttgacaatatagtaaagtggaaacaaactttcgccaaagtacatgacgtggatttcactttcttatttaatgcggagaagtttcaaagatggagtgatgaaatgaataatgaaggatttgatccgaatgatgatcttggatatcattatatgaaaggtggaatattgcctacaattagtagtaatgatgaatatagaaccggtgatgcattgatggcacgtttattttattcgtatgacaaccgttatatgattaccggtacggttcggagagatggctattctgcgtttggacaaaaaaatcctcgggcggtattcccctcagttgctgtcggctgggtattctctgatgaaccttttttgaagaagttaaattggttggactatggaaagctaaggttctcatggggattaaatggtaatagagacattggggtttatagagctttagccagaatgggtaatagtaaatatatgtatgtaagtccggatggaaaggtttataatggatcctatctttatgtgaattctttggctaataaagaattaaaatgggaacgtacggcttcattcaacttaggattggatttttctatatttaatgaacggttaaaaggaaatatcgatatttataaagctaacacgaaagaccttcttattgaacgtacattacccgaattgatcggattcagttcagtgatgtctaatttaggtgaagtagagaataaaggtattgaacttagcctgacatcgaagaatattgatacaaagaattttgcatggagttcaacattcaattttactttgaacagaaataagattgttcacctgtacggagatatggttgatgttttagatgagaatgggaacgtagtaggacagaaagaggctgacgatatcaagaataaatggtttataggtaagtctttggatgaaatatggggattggaagttattggagtctggcaacaggatgaagcggaagaagcaaagaagtatggtgtagctcctggtgattttaagttgagggatgttgatggaaacggacagtatacagatgaggataaagtattccaagggacaactagtccgaaatttacatggacattgcgcaatgattttaagatatataagaatatagatgtttctttcatgttgtattctctttgggggcataaaggtacatatgatgtagctaagcatagtggaaccacggtatataatgatagacagaatgcttacaagttaccatactggactccggaaaatccgacaaatgagtgggcaagaattgattccagtacaggaggaaacagtttttctgtatatcggaaaaaatcatttattcgattagataatatatctgtcggatacaatgttccatcacgttggattactaaattgggattaggctcattgagagtttatgctaatgtaagaaatgtagcggtttgggctccggattttaaactttgggatccggaaaatagtagtcctactcctcgtacgtatacttttggtattaatgtgactatgtaattaacttttaagaatcaatgttatgaataatattagtaaattagtgataataggatctgttgcgataactctttcgagttgtggggacagctggttggaacctaaacctctttcattttattctccggagaatactctggtagatgctaaaggtatgtgggctgcacttggtacttgtgagaaaaggattaaagcggagttttatggagatggacctgccattattaccgaacatattttttctgaggtagctattgaaggaactacggacaaaacaagtgttgctcaagatctaaatgcggttattacgcctgataaaaatttgaatagtcctaatgccaatagagtaggttggtattggaatgaagcgtatgataatattaggtatgctaatactgtgattacacgtattgatgaagcaacttactcgtctgaacaggagaagaacgagatattggctactgcttatttctttagagcttatcactattatcgtttgataaatcaatttggtgatgtgcctttactattgaaagaatttacagaggcgaaactcgacttctatacaacaaagcgtgaggtcattttaaataaaatgatcgatgatatgaagtttgcttgtcaatggatgcctgaggtggttgatagaggaaaagctccacgtgcggcaggctatcatttgttggcaaagttatatttggctgccggtttgtttgatgaagccataacagcagctacggctgtaataagtgatccgcgttatgaattgatgaaaaatagattcggagcagaaaaagctgatgctactaaaaatgtgatttgggatttacatcgccctgaaaataaggcattggcagaaaataaagagactatcttgttggttattgacagataccttgtagaaggaagccaaggcgatggaatcagaacgatgagaaatgcagtgccttattatggaaatacgaagaatgctatattgactcctgatggtaaacagggagtaacagacaaaaaggatccgacaggaacagttaaaatttcactagttaaaaagtatggacgtggaatcggacgctgtcggggaacagcttattctacccagtatatttgggatgatccgaatgatttgcgtcatgcaaaaggaaattggatgaatatggaggatttagtatataatgaacctaagttggaggggaaaaataaatattatggcaaacctttacagctttatggagagactggacagctgttgtgtaaagatacaattcgtagttggtttggttggccgcattacaaattatttataccggatccggacagagtagatcaaccggaaggtggtaatacagactggtatgtatatcgtttggcggaaacctatttgttgcgtgcagaggcttattgttggaaaggcgatgctgctagtttgcagaaagcggcagatgatgtgaatgaagtaagaaatagagcgggtgcaggtgatttggcggcatctgatatgaatattggaacaattttggatgaacgtgcgagagagttatattatgaagaacctagaaaaacagagttgactcgtattgcttatatatttgcacaaacgggaaaaccctcttatactggtaaggtctataaaatggataatttctcagaagataatttcttttatgatagaattatggagtccaccgatttttataataaaggagttaaaactatttctaatgtggaatttacaatgagtccgtatcatgtcttatggcctattcctgcatctacgattaattctaatactaaagggcatattaatcagaataagggatatgcaggatctgaaaataatattcctcctttggaaacaatagaagctaattaatttatttagataaaatctcagtatctttggtgtgaccgaagatactgagaactaataattataaaattatgaataataaaaatcatagaatattcttcttttttctagtattttctcttttggtaaatggggggaatgcttttgcaaagaaaagtaaggatcgtgagtattgggtgaaaacaatgatcaagattattgatccgctatataccaatttgagtcagaatactttgaggaaaaacatgcctgttgaaacctttgatggattaaacaatggcaatacaagaaagaatgtgacgcatttggaagctttaggacgttcatttgatggtatttctgcatggttgaatttacctcctgatgatacggaagaaggtcagcttcgtgctaaatataccaatttagtggtgaaatctattgctaatgctgtaaacccggaatcacctgattatatgcgttttgatgggcctggaggacagccgttggttgatgctgctttttttgcacaaggcttgttacgttctaaggatcagatttggccgaagttagataaagtgactcaagagagaattattaaggaattgaaagcttcgcgcaggatcaaggcgtcagagtctaattggttgatgttctctgctactattgaagcggccttattggagtttacgggtgaatgtgatttgaaaccaattcattatgcgttaaagagacataaagaatggtataaaggagatggctggtatggtgacgggcgtaattttcatttggattattacaacagttatgtgattcaacccatgttgatagatgtattggcggtcatgaaagagcataaagtggaaggggctgatttttatgacgtacagttacaacgcctgatccgttatgctgatcaacaagaaaagatgatatctccggaagggacctatcctgtattgggaagatcaatgggctatcgttttggggcttttcaggtattagctcaggtatcctggatgaaattattacctgaacatatcaaaccggcacaagtgcgttgcgctctaactaaggttatgaaaagacaattggccaaaggtacatttgataaggatggatggctgaatctgggattttgtgggcaccagcccgagattgccgacagatatgtatctactggcagtaattatttgtgtacttttattttcttgcctttgggtttacaggcggatgatgaattctggacggccaagcctgagaaatggtcttcggttaaaatatggagcggaagtcgtgatataaagaaagatggttctattagaaactagaattaaatctcgaaggtatgttctatttaagtaacaatagtacaacataccttcaacagagttgaataaaaatagaaatattatgaaaaaacatttgagattggcagctttattggctactacaattctggtattgtcaagttgcagtacacagaaacaggtcagattggttttattgccggacatacaaacttattcacgactttacccggacattctgagatcgcagacccagtgggcggtggaacatgcagatagtattgattttgttttacagcaaggggatatgacggatcacaatattgataaagagtgggcggtggcagcttctaccttgaatatgatggatgataaagttccttatgcttttgttatgggaaatcacgatttgggaaaaaattcgaataaaagagattcccaattgtttaataactattttccttatgcaaaatacagtaagatgaagaatttcggaggtgcgtttgaagaagggaaaatggataatgtatggtatactttcaaagctgccggaataaaatggctaattctttgtttggaattcgggcctcgtaataatgtacttgattgggcgggagaggttgtgaagaaacatccgcatcataaggtgattattaatacgcatgcgtatatgtactcagacgatacgcgtatgggagaaggagaccgttggttgccgcagaaatatggtttgggaaaggataccggtgagaatgcggtgaataatggtgagcaaatgtgggataagttggtgagcaaatatcccaatatcctctttgtctttagtggacatgttttgaatggcggtgttgggacgttggttagtacaggcgaacaaggtaataaggtatatcagatgttggctaactttcaggatggagtgaaaggaacgaatagaggacaaaccggttttttacgtattgtagatatagatgtgaaaaagaaacaggtaaaagtggacacttattctccttatttgaaagaatataagactgacgctaagaatagattctcatttgagggagttaattttaaataatctggttttacattccaaaggatatagctatgagcagcattcaatcattttattttgtaggtgtgattactttagtctcttctgcccatgtttatggacagaagaaagataagatgaatgttttatttatcattgctgatgatatgcgacctgaattggggtgttatggaatagaggatattgtgactcctcacattgatagattggcggagcaggctacggtctttcaaaatgcatattgtaatattcctgtgagcggggcttccagagcgagtctgtttacaggagtatatccttgttatccggaacgttttactgctttcgatgctaatgcagagaaagattgtcccaaggcactttcgcttccggagtgttttaagaaaaacggatattatgttatttccaatggaaaagttttccataatataaccgatcatgcccgtagttggtcagaatatccgtggagagtatatcctgatggttacggtaaggattgggctgaatataataagtgggaattgtggcagaacgaagagtcttcccgttatatccaccctaagactttgcgaggaccgttctgtgaatcggctgatgtctcggatacaacttatattgatggtagagtagcgcagaagacgattgcagatttaaggagattgaaagagatgaaagtacctttcttcttggcatgtggcttctggaagccacatttgccgttcaatgctcctaagaaatattgggatttatatcaaagggagaagattcagttggcatcgaatccttatcgaccgaaagcattgccgaagcaggttacttcctccggtgagattcgtggatatggaaaatttacgacaacaaaggatgaggcttttcagcgagaggcaaaacacggttattatgcatgtgtgagttacatagatgcgcagatcggtttagtacttgatgaacttgaacgcttgggattggcagagagtacgatagtagtgatattaggagatcatggctggcatttgggtgaacatggtttctggggaaaacataacctgatgaatcatgcgacccgtgctccattgattgtccgtgtgcctcattgtaaaggcggaaaagctgggggagttgtagaatttgtggatatttatcccacattgtgtgaattgtgtaaagttccggttcctgaggggcaattacagggaaaaagctttgttcctattctgcaggatagtgagaagaggataaaagaatacgcttttgttcaatggcaaggtgggtataatattgtttcggagcgatatagcagtgctatatggttgaaaggtgattctgttgtaggccggatggtgtttgaccgccaatcggatgttgcagagaatgaaaacaaagtgggttctgtctcattaagtgaagagataaaagaactggaaactcagataagaataaaaaaacttcaattagaaaaataattttaaagaatatataaatgaaagtaggttcatctattattgcatttttgggactgatggcagtttgtagttgttcagctcccaaaagcgaaatgagtactcttgtgaataatagtttgcaaatagcgactgttcaatcaaagttaatggctgagaatttattgaatgaagaggagaaattgccacgtactattggtaaggatggtaaactgatgacttcaaaggctaaatggtggacaagtggttttttccctggggtattatggtatttgtatgaggtgaatcaagatgattccttgaaaatgtatgcagaaaattataccaaaaggatagaaaatgagaaatacacaacagataatcacgatgtgggatttatgttgtattgtagttttggtaatggattgcgtctgacaagcaatgatgagtataaacaggtattgttgcaaggagcggaatcattgagtactcgttttcgtccacaagtcggttgcatacgttcatgggactggaatcagaaagtgtgggaatatccggtaattattgataatatgatgaatttagagatgttgatgtgggcttccaagaattccgataatccgaaatttgcggaaatagccaagtcacatgcagatgtgacgatgaagcatcatttccgtccggattatagctcatatcatgtgatttcttatgatacgatctcgggacagcctgaaaagaaaaacacttgtcagggatatgctcatgaatcatgttgggcacgtggccagggctgggcattatatggctatacaatgatgtatcgtgagaccgggcaagagaaatatctgcaacatgctacgaatgtggctagatttattatgaatcatcctcgtttgcctgaagataaaattccatattgggattttgatgctcctggtattcccaatgaacttcgtgatgcttctgcgggagcattaatggcctcggctttcatcgaacttagccagtatactgaaggtgatttctcaaaacaatgtctttctgttgccgaaacacagttgaagactttgtcatcgccggaatacttggctgagcctggtacaaattgtaattttattctgaaacattcagtaggtaataatccgggtaaggcagaggttgatgtaccgttaacttacgctgattattattatgttgaagctttagtacgttataaaagagatattttaaaagaaaaacttcattaaaaacttcattttaaatgatacaaagattatctttctggataatgatgattgtctgttcggtgatggtgagtgggcaagaatatgacggatattacacaaatcctatcctgccttcgggtgctgatccgtgggttgtaaaacatgaaggatggtattattattgctgcggggtgccgggtggcatcggagtttcccgttctcgtgatttgcataagataaatcctcctgtacgtgtttggaaggcaccggaaaaagggcaatggaattcgacttgcatttgggcacccgaacttcatttctggaaaggtaaatggtatattttttatgcgggcggatatagcggtcctccttttattcaccaaaagacgggcgtgttggaatctgttacatcagacgcaatgggcgagtatatcgacaaaggaatgctgtttacgggggatgttttgggagactggaaaaacaatcgctgggcgattgatatgactttgttggagcataagggacaattgtatgctgtctggtccggttgggagaatagtgaaccgactgacaaaactcagcaacatctttatatcgcaaaaatggagaatccttggacaatggcttccggaagagtaaaaatatcgtcgccggaccgctattatgaacaaggagagttgccattgaatgagggaccgcagattttaaaacacgggaaagatgtgtttgttgtttattcctgcgggcaatcatggctggatacatataaactttcttatttgcgtctgaaggacccggacgcagatttgttagatccgaaaagctggattaaaagtgataaacctgtatttgaaggtaccgatcaagtatttggggtagggcatgccagttttacaacttctcctgatgacagggaacattatatttattaccatacgaaaaaagagagaaaacccggttggaaacgggatattcgtcttcagaagtttacttttgatgcatctggcgttccatgttttgggaagccgcttccggtaagcgagaaacttcctttgccttcaggcactgctcatcctgtaaaagttaagccgatgagtgagctggaaaaagactttacccaattgtcttcgactgcccggccttatacatattggttctggatgaatggaaatatcacaaaggaaggcattacaaaggatctggaggcgatgcatcgtattgggataggtggtgttttcaatctggaagggggaactggaattccaaaggggcctgttacttacttaagtccggagtggtcggaattaaaagcacacgctataaaagaagcagctcgtttaggcattgattatgtgatgcataattgtccgggttggtcgtcaagtggtggtccttggattactcctgagtattcaatgcaaaaattgacttggagtgagactgaggtggcaggcggtaaacgggtggatactttattactccggccggcaacggaattaggatattatagagatatagctgtgttagctttcccttctttcaagaatggtaaacctgtgggcttttctgattggcagttattgaataacagtgtttttaatcatagagggaagatcggtatacaaacgtatgacaaagaacaagttattcgcttggaagatattattgacttgacgaatcaggttgattctttgggacgtctgaattgggaggcacctttgggaaactggactgtcatccgtttgggacatacttctaccggaagaaaaaactgtgcagctccggatacaggcgtggggcttgaatgcgataagtttagcaaacaggcgattcagcttcattttaataaaatgatggatttattgtatccactaatcaaaccttatgttcaccagattcagataggactggagatagatagttgggaagtcggtatgcaaaactggacatccggatttgaaggtgagttttgtgaaaggaccggatatgatttgattaaatatttgccggctatgacaggtaagattgtaggaagcaaagaaatgacagaacgtttcttatgggatattcgtcgtgtacaggctgacttgttggcagataattattatggtgaatttcggaatctatgtaatcaatatgggctggtatcctattgcgaaccttatgaccgcggaccaatggaagaattacaaataggctcacgggtagatggagttatgggagagttttggaatgggttatctgctattttccagaacaacttgatgatgcggcgtactacaaaattggcgtcttcgatagctcatatcaacggtcagaaagtggtgggtgccgaagcatatacttctgaacctgagtcgggaagatggcaggaatacccatttgctttgaaggctgttggtgataaggcgtttacagaggggattaatcggatggtgattcatcgttatgcaatgcaacctcatccggatgctgctcccgctatgactttaggcccttggggaatacattttgacagaactaatacctggtgggagccgggacgtgcctggatagattatctgaaccgttgtcaaactctattgcaagagggactattcgtagctgattttgcatactttacaggtgataatattgtaggatacacgaaagtgcatagaagagatttgaatccggtaccaccggaaggatatgattacgatttgatgaatacggaaacgttattgaatagagcttgggtagaacgcgggcgtttaaggcttccggacggaatgaattatcgtgtattggttttacaggaacaatcgcatattacgttgggtctattgaggaaactgcggaatatggtggaacagggattgataattgtcggtgcccgtccgcaacagaccgtagggttgcaatcttattcagttattgaagaaaaagagtttgaacaactttgtgacgaactatggggaaaggccgcaactacagtggtggatcgtagcgtagggaaaggtaggattttctgggaaacctctttgaacttggaacaagtacttgagaagattcagttaagacctgactttgaagtgatcacagattcaattagtgccccaatacgttatatccataggcagataggagaggcggatgtttattttgttgctaaccagcaacggacttcgaaagagctgatttgtaactttcgtgtgaaaggaaagattcctgagttttggaatcctatatcaggtgaaagaacacgggctatggtatatcaaacgaatgaagaaaccatatcggtgcctgttcaactggaagcgtatggttctgtgttcgtcgtctttcgttctgaccttcctgaacagaaggctattcgttctattcataaagatgggaagtgtctgatagatgcttctgctatatcaaccgaagaatggaagcaggcggcataccctgacataagagataatttctcaatctcattgtgggtgaaaccggaatcagatgccatgttgaatatagataatccaatgggatatataccgtacccttggacggaatattatgcaatctatccgtcgggcggtgaactgttatatggcgcaggacatgccacttgtggactggctgtaggtagaaatggagttgcggtatgggagaatgagaaaggatatcctgagtttaaaatgggagtggaaaaacctatttccggttggagccatatttgtctggtttatagggaaggggctccgcatatttatatcaatggagagcatatagcttataagacgaagtctttgcagacaattcatcctggattgaattttacttctttaaaagaaggagcttcctattataatggggatatgtctgttccggtgttgttttctaaagtattatcagataaggagatttctcaattggtagccaaaggatatacaagaaatactgatgagcgtatattggactggataccttatgcggatacccgctctctgttggcatggagtgatgggaattatgaatttgttacatcggacggtataaaaagagaggtaaaggttgaaaaaacaggaagtccggtgatgataaatcagaaatgggaggttagcttcccgaaagggctgggagcaccggaaaaaataagtttgcccaaattgttctctttgcatagacacgaagatgagggcgttaaatatttttctggtacagctacttataaaactaactttgttgtgaaaccttctatgatgtctgaggatagagttgttttccttgatttgggtgcagtagaggtgatggcggaggtgattgtcaatggagtaaataaagggatcttttggtcccgtccgtatttaattgatgtcactgatgtgctgaagccgggtgaaaatacattggaaattaaggtgactaatcaatggacgaatcgtttgattggggatgaacagttaccggaggagaacgagtatgtacccggaggaggagtaaatggaattgctgctttgagtcgtggggctatcagaaagctaccggactggtatagaaatggagtaaataaaccggaaggcggaagagtggcattcactacttggaaacattaccggaaagactcgccattgatagaatcggggttaataggtcctgttcggctgattcctgcgaagaaaatagaatttgaataatggatatgataatgtgcgaacgtatagtagccaagacatctgtaagaatgctattgagcttattgctaatctttggctcggtgaatcctgctatgtctgtgttacgaaaaggggagacatcgctggggacgtcttttgaaagttattttccattgaaagaaatacgtttgtcagatggtccttttcttgatttgcaacaaaaaggcaaagaatatcttctttggctgaatcctgactctttgcttcatttttatcggattgaagcgggattgtcatcgaaagccggaccttatgccggctgggagtcgcaagacgtatggggagcaggcccgcttcggggtggatttcttgggttctatctttcttccgtatcgatgatgtatcaatctacaggcgatagagagttactgagacgattgaaatatgtgctgaaagaattgaagctatgtcaggaagccggtaaagatggcttcctgttaggtgtgaaaggaggcagggaactattcagggaagtagcctcaggaaagataaaaacgaataatcctacggtcaatggtgcctgggcacctgtttatctgattaataagatgctgctcgggctttctgctgcttatacacagtgtgacttgaaagaagcgttgccgatattagtacggttggccgattggtttggttctcaggtattggataagctgactgatgaacagattcagcaattattgatttgtgaacatggttcgattaatgagtcttacgttgaggtttatgagttgacggggcaaaagcgtttccttgattgggcccgccgtttaaatgatcgggctatgtgggttcctttgtctgaaggaaaggatgttttattcgggtggcacgccaatacacagatcccgaaatttacgggtttccataaatattatatgtttaccggtgatcgggcctttcttcttgcggcgactaatttctggaatattgtgaagcaaaaccatacttgggtaataggtggtaacagtaccggagaacatttcttctctaaaaaggagttcattgataggatgctccatatcagcggaccggaaacgtgtaattccgtaaatatgttacgtttgaccgaagctctgttcatgcagcaaccggatgcgactaaggcggcatattatgaaagaactttatttaatcatatcttgtcagcctatgacccggtgaagggtatgtgctgctattttacttccatgcgaccggggcattatcgtatttatgcttcacgtgatagctctttctggtgctgtggacatacagggctggaaagtccggcgaagctgggtaagtttatttatagccataaagtgacgaataggcatcaagaaaaggatataagagtgaatctgtttattccttccattctttcttggaaagaagaaggagtcgagcttattcagcaaagccggattccggaatccgaacaagttgaccttatattgaatctaaagaaaaagcagaaactgattctgcgcattcgtaaacctgattggactgataaggctacttttataattaatggagaagaagaacagcctctgcttggcagtgatgggtattggattatagacagagtgtgggagcggaagaatgtgattacactacgacttccgatgcatatatatacagagaacttaacaggtactgaccgttatgttgcattattatatgggccttacgtgcttgccgggcgtatgggaaaggaaaatcttcctactactttttggggaaagatgaacaatacggctatgaataagatggacatggcaaaagtcccggtattcagagaacctgtagaacggattccaactcatgtggaggttgtttcaggagaaccattgaagtttggcataaacttgaaaggttttgagcatatagtgctggaacctttttataaagttcattttgaacgttatgcggtatattggccgataactcattagattctgaatggaaatgaaggtataatagaacaatagataagaggtatgaaaacgatattaaggacatttgtgggttgtacagcgattttgtttggtactgcctgtatgggagcagtgaagtatgttcctgagaatatgaaggtagaactatctttaaaggttccgggtaataatgctgtgaattataaactgcatccggataagttggagaatagctattttgattatgagtggcgttcggataataaattgccgataacggtttttcataaagttgaagaacgggatagttgtatgcgattgactgtacagcttaccgctgcacaggatgtttacttcaactatcgtcaattgttgagtacgggctatcgccatgataactgtcagttttatatgccgggattttggtatcgccgtaatttgcgttctcctaaaaaagctccatcattccatacgtcggatagttggttgcttcgtgaagacaggttgagcgcaccacttacggggatttttagtgaaaaagaaaaacgatttatgacagtaaatcgtttggatgatttttctatggatgctttagctacacataaagaaggagagatcattctttcagggaagacttccttgggatttaccggatttgagaatcagcagggaatagctatgctttcttttggttttccctatcgggaggctcctaaaagttatattcgtaaattaacattagcacctgaggtggaggcttttcaactgatgaagaaaggtgagtcggtattgttgacatgggaaataatggaaagtggtgcggatgatttttcagactttatacagcatacatgggagcattgttatgatacctatgcaccaaaacctgtggagaattcatattctatagcggatatgaagcaagtgcttagttgcttttttgtaaatagtttggtcgataatcaaccgctggtttataattccggaatacatctgaaggtaagtgactgtgaaagaaacggtcaggctgaggttggttttatcggtcgtgtacttcttaatgcatttaatgcatgggaatacggttggcaatcgaaccgggaagaactgaaagtgaacagtacaaagatatttgatagttatttgaagaatggtttcacacaagcgggatttttcaaggaatccgtgaattttgacaagggatatgaggaaccgatccatagtatccggcgtcagtcggaaggcgtctatgccatgttccatttcttagcttatgaaaaagagaacggacgccgtcatcctgagtgggagcaaaagttgaaaagaatattggatatgttcttacagttacagaatgttgatggtagtttcccccgtaagtttcgtgatgatttaactattgtcgatccgagtgggggaagtaccccatctgctacgttgccattagttatgggatataaatattttaaagataagcgttatttggccagttccaaacggacggcagactatttagagaaagagctgatttcgaaagctgattatttctcatctacattggatgcgaactgcgaggataaagaggcttctctctatgctgctaccgctacttactatctttcattgataacaaagggagaagaacataggcattatgccgatttgacaaaaaaagcggcttattttgctttatcctggtattatttgtgggacgttcctttcgcaccgggacagatgctgggtgatataggtcttaaaactcgtggttggggaaatgtttctgtggagaataaccatattgatgtttttgtttttgagtttgcatctgtacttcaatggttgtcaaaggaatatgctgaacctcgtatggctgattttgcggaggtgatatctacatctatgcgtcagttgctaccttatgaagggcatttatgcggcattgcaaaatccggtttctatccggaagtcgttcagcacactaattgggattatggtaagaacggaaaagggtactataatgatatctttgcaccgggatggacggttgcttctttatgggagttgttgactccgggacgtgcggaaaggttcttgcttgattaggtaaactattgaagaaagtgaatacaggtctgtggctttcttgaaaaagagaaaatgcagtaattaccagaaagcatgccacaaggacttgacaaacggctttaaatgttgtatatttgtagtctgagaatataaggggggagacctaccacctccccctacgggtactcctccttcctgaaggaggagaatattagatactactgacttattctcaacctcaaactatgcagggtgtttgtgaaacttgagttattaatgaataaatgagaaaaaagatataaaatcgagtatgaaaatagtgagatattacaacaaatatagctaactgtcctacccttgtacagagacaggaatgattaatataggcaaaaggctgcaatctttataggaattgcagccttttttgttgtaataaatggatgctaagattctaaatttctatttgagagtttataataaacttggataccgtttataataaacgattcggaaatttattataaaccgaataggagtttatgtagtgaactgtaaattattttagtcatattgattttcgtgcatggaatcttcttgaattcgggtaattatagcatacaatggatctggtaacctaattatacaagcacttgtttttcttgtcctgttatccggcccagttctccctatccagatttctataactgatcgcttccgctaaatgtccggaaagaatttgctcacttccttcgagatcggcaatggtgcgtgatactttcaatatcctgtcataggcgcgggcggataaattgagccgatccattgcattctttaataaggtaagccctttgtcatccggccgggcaaatagtgacagtaatttgctgttcatctgtgcattgcaatagataccgggatattcggcgtagcgcttttcttgtatttgccgtgctttgataactcgttcgcggatcgtttcactggattctccccttctctggtcagatatcttatcgaatggtacgggaatgatttctatttgaatgtcaatcctgtcgagcagcgggccggaaattttattcaaatatttctgtacttgcccgggactgcatacacaagccttcgtcggatgattataatatccgcaagggcaaggattcatcgaagctaccagtgtaaaactggccgggtaatcgatgctgctttttattcgggagattgtgattctcctgtcttccaatggttgccgcagtacctcaagtacgtttctattaaactccggcagttcatctaggaataaaattccgttatgcgccagacttatttcccccggctggggaaaactgcctccgcctaccattgctacttgcgaaatcgtatggtgcgggtcacggaaagggcgttgagtgattagggaggaattgcggtttaattttccagctacggagtgtatcttggtcgtttcgaggctttcacccaacgagaggggagggagaatggaaggaaggcgtttggccatcattgattttccgcttcccggcgcacctatcatgatgagattgtgtccgccggcagcagctacctccagtgctcttttcacgttttcctgccctttcacatctgcaaaatcaaactcgaaagtactttgatgggcatagaactcttctcgggtattaacaactgtcggttctaatttgcgttcattattgaagaactcaatgacttccctgatattgctgactccatagacttttaactggttaactacggcggcttcccgcgcattttgttggggaatgattaatccttcaaaaccgtcttcccgtgctttgatggcaatgggaagtgctcccttgatcggttgtatgcttccgtccaagctcaattctcccattaacaggtagcgggaaaacttctccgatgatatagtttcattggcgcccagcaacccgatagcaagaggcaggtcgtaggccgaaccttctttccggatatctgccggcgccatattgactacaatattggtggtcggcattttataaccgttgacttgcagtgcggagatgatacgttggtggctttctttgaccgctgaatccggaaggccgacgagataaaacatacagccacgcgagctgtttacttcgattgtgatgagtgttgcatcaatcccttgaacagccgctccgaaaactttaattaacacgtttggttactggttatttcttttttttgttgtctttcttatctttttcttctgctgcggaaactacttcttcaattttcttcttcagcttttcgcctttgaggtcctttgccagaatctttccgtctgctgacaggagtatgttggccggtatttgccggatcgtatattgtttagcaacttcggagttaaatccatcgaagtcgcacacttgttcccagtccagcgtatcacgtttaatagcgcctttccattgctccttgttcaagtcaagagaaatgcccaacatggctatatatttattctttttgtattttttgtagatttcccgcagttcggcattgctgttttgattggcaatactatcaccccatgaagcccagaaattgattagcaggtttttctttttgaggttttccgatgtgcggcttatcttttctcctttcacattagggaggctgaaaaatggggcatatttaccgatctctgtcttttccgcttgggagatgctttcgttaagacgttcgatgtaaagtttgtcttgcaatactcctgccattacttcgatgagtttttttattttattgaagtcgggcgagtctttttggacgaagtatttatccaataggtagaggctgacgaatgaagaatgatgtccccggatgaactcttccgctttctgctccaataccttttcagagggagtgcccagccctcgcagatcttcctggaaagcagtaaactcctgattatatatattcccttcgatatgaaggtattccggattgcttatatctcctttaattttgattttgtttcctttatcaagatatatgggatattctatttggttgttgataagcagaaaagcaggagtaatggtgtccaccgggatggtataggcgaatttgtcgtccttggtgaagatcgtgtctatccggtcgcgcaattcgtccatgccgtacaggtaaagtgtatctgttcccaatcctttgatttctccggtgatactggcttccttggaaggcttgctgcaactgaacagacagatagctatgaggattaaaatactactctttttcatcattttgatttcttttctgcgaaagtacggtttttacggataaaaaaaaagaagaggctgtctcaaaatgcattgcaccccaaaagttagacaaaaaacttttggggtgcagcttttttattgctttttggaggatttttattttttcattttagcaaagagaacaacgttgttattgtcttcgtttaatgatttcactaacgcttgtgtacgttttcgtactgtgctggggagatcttttcttgccagttctttctctagtgtttcttttagttgtgacggttccatgttagagacgtaatatccgttgccgaaagacggccatatctgcatctcctttgttcctaaaaagtcattgtacaagtggaaatagttgccgtgcagtgtctttttgtctacaatatatttggcaggcttagtgcttccccatgtgtttttagacatttgtaccgggaaagaaacgtcgcctataaaatggcgcggatattcggaatagccatgccagggaattttatctttattggcatattcgacagtgaaacgggcttccagacggtttttggcattgttgtagtggtataggctgtctactcgcggggtaggcataatgaccattagcatgacatcataatcggaggtgttgttacccataaatacttcattactgaagtctcgtggaacggtcagatgtgcgggagcaacgaagtttttgcgtttgccgttaaaatcttgtgtccatactactgccggccaaccctgaaatggcagtaccgtcactgtgacttccgatttctccgtgtctactctgaattgtcctttaggaacgcgcaggcataatgggatgggggcttgtggatttcctttcaaatcgaatacaagtaatttgtcactttgccagggtaggatatagatacggttgtgggcctcgtctaactgttcagcgtacgtatttccgtattcgttcggtccctggccataggcgccaatgttggtgatatatttgccgtcacgggtgaaaagtttatagggagtctgtttgttattacttaccagaatgtaattgtcgctgacagtagtacgtacccaacctcctaccagtgcttcatcccgattgtctaactgtaccacttggagttcttctgtcagatagctcaggggaatgtctaccgtatctttcaggctttttaaattacaggaaattaatgttcccgtaggtgttgtgacgctcttggctacgacaggcgatagtgccagtgggtctttcgttgctttgctgttgtctgtaaaagcaaaaattgctaataaagaacaagcgcataaactgaaaataatacttctgtttttcatactgatatgtatttagttagtactgtttttctaattggctccgggacaaaagtaggctgaaacaaatagaaaaacaaaaaaacaggcggacaagaatgctctcttggttgtcgcttatatatctgattattagtagagtatacgctattttattattttgtaaggtggacaaaatataaatgaggttggactaattactaaaatgctttgagaaaactgtcaaggcttatgttttcatcagtgattcccagcttgtcggttttgattcgatattttcgtttggtgatagctgctttgctgatacagtagatgtctgataaatcctgtatattgacattgattttgacgaggcagcagaagccgatttctttttctcccaaagaaggataggcttgttgtaagcgaactacaaaattgtcgaaggcatcatttacgactgaaatgacttccgcccactctgtgtttgttaccactattttgctgttagcggcagattcatcctgcttgtcatcggtgtggagggaaggtagtttatgaaagaatgatattcttctgaaaagagcttcccgcaactccgcttctttgtttctctgtcggatttctttttcccgcaatccgcttagttccgcttccttgtgcaataatagattctcttgctgcaaccgctcttttttctctctttgataaaagaagaatgcgatgaaccctacgcttagtaaagctgtgatgattccaagcatccatagttcgtgcttctgttgctgaaaatgaagctggtatagctcgttttgcagtttgagctcgttgaattctcttctttgtatttctgaattgatgttgccaagtatattattttttattgtattttccttttgtttgctgtaaaacgcttgttcaggataatcttcttgatttatcagattgaataaaagagcatttgcttccatggcaataaattctgaagtggaggttgcagcttgctgatagtaatatttggcggaatctgtctggttcagggctgcgtatgtcctcccacggagcaataggtaatggggaatttcgtatcggctgcgacgttcattggataacagttggagatacttcagcgcttgccggtaatcttttctttccagactggtattcagcagattttcgaatgcataataaatgagggactggtggttgggagagtctctaagttcttctatcaactttttgtacccttgggtatatttttcatgttgctgcattgcttctataatttgaaggtatagttggcttgcagtgaagtaggcaagcgtatctttgcttttacgggttagctgtttgctgctatccgccattgcaagggcttgattgtagtcttgttttctgtaatatgccgctctccttagtccgtatatgcgtgtctttaatgtatcgttcagttggtactctttcagcaactttccggttgataataatgtggaatcgggtagattcttatataggtaggaagcgctttgctctatgtgtgcttgtagccatttggcttgtaggttgctttgtttgtagcacgtgagagcatttcggagcagtgagtcaccggggaggccggttttccatagcgttgctttataagagagcaaataatagtctccttgttcggatagggataattggcgggggtgtgctatttgttgcaaatagaagaatatactgtctgttgaaactttttccattttcatggcttctttcagtagtgatgaaggtttgggctggcaactgctcataataatgaggcagctgattaataaactgtaatagtatctactgtgctttttcatatattctattctatgattacgaatatactattttgccgacaataaagaacctttctttagggtattttattaattaaccgttttctccggataaaaaaaagaattgcccgtcatttatatgacaggcaattctcattatttaaaatagagtggtaattctattatttagcgatgctcatgaaatctgcattagtgaagtattttgcaaattccaggtcagtagctgccttcttagctaatgaaggatctttagcaactgcgctcttcaagctgcttgttaccatagaagaattgttagttctagcacctaaaacagccatcaggtagtcagtgtaagcatccggtctttctacgttagccaatgtgtttttagccttgttgtagtccttagcaaggatctgagccagagcagcactgttagtcttagagtcaccgaatgagttaactgctctttcatattgaccttgagcgatgtacaggttacccatagattcgccaagttctttagtgccggcagctttaccgaagtaagtttcagcagcagctttgtcacccttgatcaaagagatcaaacctaagttcatgttaacttcaggagaagcgttaacgctggcagctttcttgaaataagattctgctttgtcaacgttaccagcctgataagccaatttacccaagttgttgaaagcacggtaatcgttagggaattgttttgtagcctgagtatagatagcttcttgtttagcaggatcgttagtcagtgtagcagcatacagcaattcttcaacattcagttctgaaggattagaagaagccagcttagcgatttcttcgtcagacttaccgatgatttcgtagttcaaagtcaaacgagaacgacgcagctgaggaaggatttcatcagccaaagttttgtaaactgaagaaatgtttttgatttcttgttctctttgtgcaggatcttgatacattgacaatacgcggagaatcaactctttatcctggatgttagatttagaaaccagttcctggaagccttcccagtcctgtgcggtatatttagcatcgatcggagcgtcgattttagctttcttcaggtctttactcaacatcttagttgtgttgccttcacgattttcagccagtgtagtattcaagcttacaccaccatcaggagaagcgtatgcagaaacttcgatattgctgatcttcttgttagcagcttcgtttacgttagccacttctttattgaattctttagcagttttcaactcgcttgaacgaatgttagcttgttggatcaagaacatgatgttagcgtcatgtttttctttgatgatacgttggaaagcgtcttcgcccaatgccgggtttgcgttacctaatgtattgttaactaattcagaagtagaaatgacaccatcagctactttcacagcagggatagtaaccactttcttaccgatagtagctttaaattcgaggtacagttcagacttagccatttcaggaacatagtcgaaggaagttttcattgtgtagctaccgcccatcttgtaagagatagtctggtcgttaccttctactttttcaccttggaaagtcgctggttggcctttagcttcgccaccattccatttcaaaaccggagttacttctacaactgctttcttgttgaaatacttttccgggaattttccgttaatggttgcaggaactttaccacctactgcctccagcacctgcggagtaacagtgaagtaatcagctgataattcacccatttttttgctgcaagaagagaataatgcaacaaccattgccatgagtaaaggcaagtacaacttcttagtcattttaggtataaattaaatgtttgtaattgaaatatcgtcgtattcacatacacctttctgtctagtacagaaaaagtaacgcaaagatattaattcttaatataaatataaggataaggggttgattttatcataatttaatgaaattagcgctctttttctttccggtacttgatatttcggggatgatgttcaatgatctcactgcgaagcatattacggtcgatatgcgtgtagatttcggttgtagcaatagactcatgtccgagcatgcattgaatagcccgcaaattggctccgccttccagtaaatgagtggcaaaagagtggcggaaagtgtgcgggctgatatttttgatgatacctgccgtttgtgctaattctttaatcatgtggaagatcattattcgtgaaagtcctttgcctctccgctggctgacaaatacaaaatcttcatattctttttttacttcgatccggttacggtcggtgaagtagagttttatctcgttaatggcacggggggaaatgggcacaagtcgttgtttgctgccttttccttccactttgatgaagccctcgtcgaaataaagatcggacagcttgaggttgacaagttctgatacgcgaagtccgcagctatataaggtctctaatatagccctgtttcgttgcccttcggccttactgcggtcgacggcagagataatccgatcgatttcttccaccgtcagcacctcagggagtttgaagcctattttgggcccttccagcaattcgctgggatcagcctccaaataatcagccataagcaggaaacggaagaatgatttgatccctgacaggatacgggcctgcgaacggggatggataccaatatcatgtagcccggctgtaaaacgttggagatcagacaggcacacttccagaacgttgatgccctccaaggtcaggaaactcatcaatttatccaggtctgtaagataggcttccagcgtgttgggagataaagacttttccagtttgagatactgctgatactttctgattatcagttcctgttgttccttcttcttctttttttcgttgatttccatttcttttttctacctttgctccgcgaagataggctgcacctcagcagaatacaaataaatttgtttctacattcggtttgcactatctttgtggcttgaaatattgttctttggatacaaaggtataaaaaaagaggattacgcgatgaagatacaaattattaatggcccgaatataaatctgttgggtaagcgtgaaccttccatatatggaagcgttacatttgaagattatttggctgaacttcgcaaaagatacactgacgtggagatcgactattttcaatcgaatattgagggagagatgattgactgcatacagcaggtaggatttgacgtggacgggattattctgaatgcgggtgcttatacgcatacttccattgctttgcaggatgctattcgctctgtgacgtctccggttatcgaggtgcatatctccaatgtacatagtcgtgagtctttccggcatgtgtcgatgattgcttgtgcctgcaaaggggtgatttgcggctttggactgaactcatataggttggcgctggaggcattgttagaaaataaataaggtataatatataataggtagaaagactatgttattgaaacagactaagattgtggcttctatttcggatagacgttgtgatgtggattttataaaacagctctttgaagctggaatgaatgtggtgcgtatgaatactgcgcacgccagccgtgaaggttttgaagctctgattgcaaatgtacgtaccgtgtccaatcgtattgcgattctaatggatacgaaaggaccggaagtccgtacgactgccaatgcagaaccgattccatataaaataggtgagaaagtaaagattgtaggtaatccggaacttgaaactacccgtgagtgtattgctgtttcatatcccaatttcgtacacgatttgaatatcggtggtacgattttgattgacgatggtgatctggaactggaagtcattgataaaaccgctgattatttgctttgtgaagtgaagaacgaagctactttgggaagccgtaagagcgtgaatgttccgggtgttcgtatcaatcttccttccttgacggaaaaagaccgtaacaatatcctttatgctatcgaaaaggatattgattttatcgctcactctttcgtgcgcaatcgtcaggatgtacttgatattcgtgcgattctggatgctcataatagtgacattaagattattgccaagattgaaaatcaggaaggcgtagataatattgatgagatactggaagtagccgacggcgttatggttgcccgtggtgatttaggtattgaggtccctcaggaacgcattccgggaatccagcgtgtgctgattcgtaaatgtatcctggcaaagaagccggtgatcgttgctacgcaaatgttgcatacgatgattaacaatcctcgtcctactcgtgcggaagttactgacattgccaatgcaatttattatcgtacggacgctttgatgttgagtggtgaaactgcttatggtaagtatccggtggatgcggtgaaaacaatgactaagattgcggctcaggctgaaaaagataaactggaagaaaatgatattcgtatcccgttggatgaaaacagtaatgatgttacggctttccttgccaagcaggctgtaaaagctacatctaagttaaagatacgtgcgatcattaccgacagttatagcggacgtacagcacgtaatctggctgctttccgtggcaagtatccggtattggctatttgttataaggaaaagacgatgcggcatctggctctttcttatggtgtggaagcgatctatatgccggaactcgcaaacgggcaggaatactattttgcagccctgcgccgcctgttgaaagaaggacgtttgcagccaacggatatggtaggctatttgagcagtggtaaagaaggtacgcaaacttccttcctcgaaataaatgtggtggaggatgcgttgaagcatgcggaagataccgtattgcctaataataaccgttatctgtaaaaagaacaggctgtatgcaagagactgaatctattgacgaatatattctgcaacatattgatcccgaaagcgattatttgaaagcgctgtatcgggatacgcacgtaaaattgcttcgtccccgtatggcttccgggcatttgcaggggcggatgttgaagatgtttgtgaagatgattcggcctcggcagatactggagatcgggacgtatagcggatattccgctctttgtctggcggaaggtttgtcggagggcggaatgttgcatacctttgaaataaatgatgaacaagaggactttacccgtccgtggcttgaaaaatcgccatttgcagataaaatccgtttctatataggtgatgccttggaacttgttcccgatttgggcgttacgtttgatctggcttttattgacggtgataaacgtaaatatattgagtattacgaaatgacgttggctcatctttccgaaggaggatatatgatagctgacaatacgttgtgggatggtcatgtgttggaacaaccccgtaatacggacgcccagaccatcggcattaaggcttttaatgatcttgtagccaaagatgaacgggtggagaaagtaatattacccttacgtgatgggttaacgattataagaaaaaagtaaaggagtagatttatggaaacaactagacagaataagatatcccgcttgttgcagaaagaactgagtgagatattcctgttgcagacaaaggcgatgcatgggacgttggtatcggttagcgctgtgcgcattagtccggatatgagtattgcccgtgtttatctcagtgtttttccttctgagaaagcagaagaaatggtgaagaatatcaatgataatatgaaatccattcgttatgaactgggtactcgtgttcgttatcagctacgtattatccctgaactgaagttctttgtggatgattcgttggattatatcgagaagattgactcattgctgaaatgaaataattcattgcagaggtgaatttccccttctatatagcccggcgttatcttttttcgaaaaagaaacataatgctattaatatcatatccggcatttctgtgtgcggagtggcccttgctacattggcgttggtctgtacactctctgtttttaacggctttcaggatatggtggccagctttttcaccgctttcgatccgcagttgaaaattgtggttcgtgaagggaaggtttttgacgggcaagatgaacggattcgcgctgtttgtgcgcttcccgaagtggctgtatctacagaaacgctcgaagagaatgcaatggtacagtataaagaccgtcagactatggctgttttgaagggtgtagaagataactttgaggaactgaccgagattgacagtatactttatggagccggtgagtttctcttgcatgattcgattgtgaattacgggattatgggagtggaactcgtggccactttaggtacaggattggagtttgtcgatccgctccaggtttatcttcccaaacggaatgccaaagtaaatatggcaaatcccggtgcttcctttaaacgtgactatctttattctcccggagtggtgtttgtcgtgaatcaacagcagtatgatggtaaatatattcttacctctcttgattttatccgacaactgctggattataccacggaggtttctgcgatagagctgaaattaaaatccggtgcaaacgtctcatctgtacaatctaagatcgaaaagatgttgggagatgattttgttgttcaggaccgttatcagcagcaggcggatgtgttccgtattatggaaattgagaaactgatctcctatctatttttgacttttatccttatgattgcctgttttaatgtgatcggttctctttctatgctgatactggataaaaaagatgatgttgtaacattacgcagtctgggggctaatgataaacttatttcccggatattcttatttgagggacgtcttatttctctttttggtgctatctccggtattattctcggattaattttatgttttatccagcagaaatttggcgtaatttcgctaggtggaggcggtggtacttttatcgtggacgcctaccctgtcagtgttcatgcgtgggatgttgtgcttgtcttcataaccgttctgactgtcggattcctttctgtgtggtatccggtacgctatttgagtaaaagacttttatagtcggatgcggaacttctcttgtggaaactttcctatatttgaaaacttttaaagccttattattttataattgatgatatacttgtatatttgactcgattttgttaattgaaaagtaatctgtacaataattcgtgagagtgaaaagtgaagacataagcaaaattgcagatggcgatgaaatggtttttacccgtttcatggagcattattctacgcgcttatattattatgcttatggcttgttgggacagaaagaaatggccgaggaagtagtgagtgatgtctttttcgaggtctggaagaacaggaaggggttggtgcagattgaatatatgaatgcctggctgcaaacaatcacctatcgcaaatcaatctcgtatttaagaaaagaaaccgggaagaatgaactttcatttgatgaaattagtgatttctcttttgaacccgtgcaatcgcccgatgaggaaattataagtaaggaagaggtggcagaaataaataatgctattgaaaaactcccgcccaaatgcaagcatgtcttttttctggcaaagatagagggactaccttatattaaaatagcagagatgcttgaagtctctgtacagacggtgaattatcacatcgcttacgcaatagaagcgctatctaaaagcttgaagatagcttctccaaaaaagaaataatccgaaggggctcggaagattctctattttttcttccctaaaaaaactacacgctattctaaggcacgttctatttttttagaaaaaaacgaaaaaaagttcgtttttgacctaaagatttctttttaagttgcgactataataatagaacaacttaaaaaagaatatgaatttgaaagaatataaccgtctgactgatttatttggtaaactgaattcccgggagaatactgaggatgagtttgctgctatgtccgaaggcgagaaattgaaattcttttggaaagattgcatgccggaaaaaattgatgcatcttctattatagagaagacacagcaaaaaataaaacgtgatgctatgagacgcagaagaaattacttcttggttgcttctgcttcgattgccgcttctgttctgatttgtatttcaactatatacttcctgaaccagaccggagaggaaaagcagaattttcaggcaatggtagagcagatggagaactcggcaatcgatgaagtgactctgataacttccaaagaacaattgaatctggatgaaaatgcttttattaaatatacgaaagaaggaaaggtggctgttaattcacaaaaagtggaagaagagaaagaagagggaggaaaggttgcagagctggaagaatacgaccaattgttggttccggcaggaaagcgtgctaagatagaactctctgatgggactttggtcactgtgaattctcagtcgaaagtgatttatccacgtcgttttaagggagaaactcgtacaatatatgcccagggagaagtttttttggaagtagcacacgataagaaacatccgtttattgtagaagccaacggttttaatttgcgtgttttgggaactaagtttaatatctcaaattatgaaggtgaagctacgaacattgtattggtagagggctcggtagaggtgactgataagaatgagaaaaaagcacaattggttccaagtgatttgctaaatattaccaacggcaatatcgcttatcaaaagcaagtggatgttaccggatatatcagttgggtggatggaatacttatgctggaaggaaataatctgtctgagattactaaaaaactgagtaagtattacggtatatccattcaatgtaatcccgaagtgggcaaagaaaaagtttatggaaaactggatatcaaagacaatatagacgaggtgcttaaatgtattcagcaaacgcttccatttgttattgtaaaagaaggaaaaagtatatacttaaataaataaccgttttaattaatctaaaaaatgaaaatacttatgaaggacaaatctacgtagtaatgacaaaaaatcggataaatatggctgtatttatccgatcgtaattccttagttaaatcaataaatccaaaattgttaacctaaaaagaaatttttatggtaaagaaagctattttccctaatctaaagaagaaagttaatctttttttgataattaacgccttttttatgattccttgctgtgctttggctgaaacagttgctaaatgggactcagaaaaagacttgttcacagtacaatcaaataatgtgaccgtaaaagatgtattaaattacattgaaaaaaacagtaagtatatttttatttattcggagggcgttcagaaaacgttgacggataaagtctctatttcggttgataataagaagatcgatgttattttaagtgagttgagtaagaaaacgggattgaaatataagattgtcgggagacagatcacgatttctaggccggaagtggaatcccctcagcaagatacaagaaaaggtgtaaaggcaacgggtaacgtgaaagatgataaaggtgagccattgattggcgcctctgttcttgtgaaaggaactactaacggaactattaccgggatagacggagactttacactggctaatgtcaaaaagggcgatatccttgaaatctcatttttgggttataaaactaccactgttactttccaaggtagtaaagttagtgttattttgcatgaagattcagaaactcttagtgaggtagttgttgtgggatttggtgtgcaaaaaaaggcatctgtggtaggctctgtggaatctatcaaaccggcagaactgaaaataccgtccagtagtttgagtaatgcttttggtggtcgtattgccggtgttatcacgatgcagcagaatgctgaaccaggtgcagatggggctagcttctggattcggggtgcggctacctttagtggtactactaatccgctaatctatatcgacggtgtggaatcgtctaccgatgacatgaatgctctgccgcctgaggctatcgaaaacttttctgtattgaaggatgcttcagctacagcattgtatggtgcccgcggtgccaatggggttattctgattactacccgttcgggtaaggatatggaaaaggccagaattaatatccgtattgagaatacattctcacaacctacccgtacactgaaactagcggacgcagctactacgatggagacgagaaacgcagcggtttgggctaggaacccggaagctacggctttttatacgcaggagagaatagacaatactcgtaatcgaattaatccgtacttgtatccggatgtggactgggtggatgttctgttcaaggatatgtctatgaaccaaacagctaatatcaacgtaatgggtggtacaagtaaagtcgattatttcctgagtgctacgttgaataatgataatggccaattgaagcaggataagaataattcatttgacaataatctgcaaaatctacgatattctattcagggtaacattggcgcatggctgactaaaacaacaaaagctaccatacgtcttaatacacagattgaacaatataccggaccaactacgagcgtaccggatctttatcagtttgcattacgtgcaccgagtatgtatttcctcccttactatccaaatactattaatgccgatcatgttcttttcggtaatagctatgaaaatgcttctgagggttcgggataccacatgaatccgtatgctgagatggtgagaggtagacagcatagtgcagcttctactatcaacgctagtttggaattggagcagaaactggattttatcacaaaaggattaagttttaaagcattgattaactttaaaaactattcgtacacatactacagtcgtacgtttaatccgtactattacagattggatagtgcagacccattggaatctggaggatatgatttccaatatacatctatgaatcaaggtagtacagcattgactttagcctcaaatggcagttcgggagatcgctatatgaatattcaggcattactgaattaccagcgtacgtttgccaacaaacatgatgtgggagctctgttcgtttacttacaacgtgattacaacgttaataatcccggtgactattatgctacactgccacagcgcaaccaaggtattgccggtcgtgtgacgtatgcttacgacgggaaatatctggctgaagctaattttggctacaatggttccgagacttttcagaaaggcagtcgttttggtttctttccttcttttgcagtaggttatatgatttcaaatgaagaattttttaagccacttaatggcatttttactagtttgaaattgcgcgcttcttatggcttagtgggtaattccgatattggcagtggtcgtttcccctatctaactaaggtaaatctgaatggtggtggtagttatcagtttggcaagaactgggataactcggcatctggaacttcaatcagtacatacggtgctgataatgtgacgtgggaaattggtgagaaatatgatattggggtagatatgactttattcaaagatttgaatttcactattgactactttcgggagaatcgtaagaatatctttttgcagcgccagaccatttcagttgaaaccggtatcactggtacggctccttatggaaatttgggtcgtgtgaagaacgaaggtctggatatgtcgtttaattataatcattcattcaataaagacttttttatttcggcgcgcggtacatttacgcttgccaagaatgagtatgtggaaagagatgaacctccttatgaatacagttatatgtcacaagtgggacaaccgttgaacaattattatggctacatagccgaaggtttgtttcagagtgaagatgaaatagctgatagtccaacgcaagagttagggacttataagactcaggtaggtgatatcaaatacaaagatttaaatggtgacggtaagattgatggtaccgacaagacttacatcggtaatcccagtgtgccacagattatttacggttttggtgctagtatgcaatataagggttgggatgcttcgttcttctttcagggtgttgccaaacgggatattatgttacaaggtatccattcgttcactggaaatacacacaacctgatgcaatgggttgttgataattactggagagaagatggtgcgaatccaagtgctgagtatcctcgtctgaccaacggctcgaacccaaatacaaccgagccctctacttattggcttaaagatggatcatatatacgtttgaagaatgtggaactaggttatacatggaagtttctgcgtgcttatgttgcaggtgcaaacttgctgacgttttcgaagttcaagatttgggatccggagctgaatacccagaatggacaggcatatcctacacaacgtactgtaagtgttggtttgcaaatgactttttaaacaataattattataatgactttaaatattacgacgattatgagaattaaaaatatattcatggcaactttgctgggcgtgatgctgcattcgtgcgagtttctggatgtggttcccgatgatacttcgactctagacgatgcttttaagacagaaactaatgccggcaactttatctatggttgttacagcgtaatgcctgctttccttgattttcgtaacaacgaagcgtgggcaactactcccgaaatgatcggttctccgcattggacttcagaatggttctattatctgatagtgcaacgatgtaactatagtcctgcgtatggtggtagtgctttatggaagaatatgtatgatggaattcgtaactgctggatttttctcaataacatagataaaactgtgcctgtgaaatggacgcaagaagaatttgaaaaaaataaaaaacaatggattggtgaagcatatttcctaatagggtattatcacctttgcctaatgcaggcatatgggccagtggtgatatcagaccaattattggattcggatgccccagcggaagaaatgatgcagactcgccgtccttatgatgaatgcgtagaaagagttgcggctttttttgataaggcgttggaatacctgccggattcatataatgattctaacttgggacgggctactagtataactgcagaagcattgaaagcacgcttgttcctctatgcggcaagtcccttgtataatggtaatactgattatgcagattttaagaataaagcagagtttggtggcgagcaattgatttctaccacctacgacaaggaaaaatggaaaaaggctctcgatcagtatgaaaaggctataacgaaagcggaatctaaaaattttagattatatgaatataccggtaatactagtggattaactgattttgataaagctgtagccaatagtcgctataagattgctgccggttgggactctcccgaattaatctggccgtatactggaagaaaagaaaccttgggttatagtaacggcttcaattatcatgccatccttcatggtatttctaatgaaactgttcctattggtggactgggtaccactttgtggactgctaggctttatttgaccaagaatggcaaagagatagacaaagacccgaactatgattataccaactgcatgcaggtggataacgacgaggtgctaaaacttaacaaaaaccgtgagccgcgtttctatgccgacttgggatatgaccgtggaccatatgaaatcagtaacgcgaatggtcttgatactattactatcaagatgaggtttcagggaaaaacaggtagtagttattacaatcccgaagaagcgcatggtgcaaaagataatgcaagcgaccaactttatgggggatatgctatcaagaaattagtaaatccgaaaactacaattcaggatggtaacaataatgtagcagcttatccgttccctattgtccgtttggctgagttgtatttaggatatgctgaggcatatgttaattactatggaaaactggatggaaagggagcggagtactttaatcttattcgcaaacgtgccggattgggtggcatagaggaaacccatccgaatgcaacaccggaagagttaatagaagcagtgcgtcgtgagaaaacagtagagttcatgtttgaagggcaaatgttttgggattaccgtcgttggaagattgctaaagaggcatggagcggaatggaaggtggtatgcctgccttgaatgtttacggtacaacagctgaagaatttaataaggaagttaaggcagacatgatgccattcgtatttaaagaagaaggctacctctatccgattcagcaggaatatttgaacaagaatccgaaattggtacagaatcctaattggtaattgagttgccataaacagacatatacatatcacactttcccttaattcccttatataggggaagtgtgatttactatacaaaacacaaaaaactgatatataaatgataaaaaattatttcctgctaggaagcttattatgtagtatgggtgccttttctcagtctaccgtatggaaacataccggatgggaagctcgcatttcagacaagggctatctggaacagattatctttaaggataagaaaggtaatgacaccattcctttctttcgttctgggcaaggtaactgtggtccttctttttatgctgaaatcagtggcaaagaaactaccgcagcttggatacctgacggatatctttcttatcggagcacgatagaccaggtggagtgccgtctaacgtatcagtcatggaaagggcagccggctttgaaagttactcttgaaaacaaagggaatgtaccttttcaaccgacaaaggcgggactgaaattgggaatcgatacttatatggataagtatccggactggtttggaaaatatttcccaacgctgatgcgcaatgaaaagacgcacttctacggttatctgcaaactcctgcaggacacgctttgggaattgtatcgccacagcctgtagcttcatggagtgtggcttacaatctgggttatcaagatccacctccacattggtttatggggcaccggatagagtcattaaatctggatttgatgaatgcattacctttgcccgaacgcaatccacaagatttgtggatgctgaaacaaggggagatcaagagctggactattgtgctcatggatataaatccgttgggggaatttgaacacgttatacataaggcgactggcataccgatgatctctattgatcggacgacttatgttccgggagaaaccgcatcttttgaagttctgtctggttctaaagatatcaaagtgttggatgataaagggcaggagttgaaggtcaatatccggacacagggagagggagtaaagcaagtgtcgtgtgtactgccggatgtcgggttgtatacagtacgtgtcagggacaatggaaaagaaacagaaggtattctttcagtacatcatgactggaaatggactatggaacaggcacgtcggaatgctttgaaatatcaccagaaagctacttcacacatagaaagttggtatggcttccattcttcttttattgctgcacaatattttccggatgaacaactggataaagctttacgtgatcgctttgattatttattcggcttgttacatgatcaacaaaagatggagcctaagtaccacgcttcacgcatacagaatacttcgggggcaataggtttgttagtagacaaatatcaagcttatggtgatatagccgacttacagaaggcttctcgtttggcagactggttgatgaacaattggcaacgtgaagatggtgcctatgtcaatcatcatattatttataccagcgttatctatgtagcgaaaagtatgctggaacttactttggtcgaacgtgagttaggcaagaagaatactgtatgggcagaggcggcggagcgccattatcaatctgccaaacgtgctatcgaccagttggttgcttcacaaggtgactttgaaacagaaggagaacttacttttgaggatggaatgatttcctgttctgcacttcagattggaatgctgggattgatgcagaaagacgaaaaggtgcgtaaacattatacagacgctatgttacaaattctggagagtcatgattgtcttacccaactgcgagtccccgatgcccgccggaggggtggaaccatgcgttattgggaagcacaatatgacgtgcagatgttgccgaacatgttcaactctcctcacggttggagcggctggcgtggttacgctacctattatgcttatctgctgacaggtgaagaacgctggttgaaagaaacttataatgcgatgggagctttttctcatctgattgattatcgtacaggaaatcttcgctgggcatttgttgtagatccgtatctgaaagtaaaacaggcttgcagtgctgatacacatgtgacacaagattcattgagttttggaaatccacatcctgaactctatgatacacgcgaatttattataggtgaacaatatgtgaatatggttagtgattggcagacaattaatacacaggataacgatgtgcacgaagtattcaagtgtattgctgaatctatgcttactaacgcctttattgtagaacgtccggacggctcggttgtcggatacaactgtattattgaaaagcaaggaaataaactgaaggtcaaagcaaatgagaagcaaataactaatcttcattgtaacttgaagcatccattcacagtcgtgtttgataaagtagataaggtgctggaggcaaattatttgggttgggcatttggaacggatatctatcaatagaataaaaggatatattttatgaatttcaaattccatatggcggtaggggaattgctctgctcatctcaagagagttcgtacatagtttgatcggcagaatggctgaattatggtggataataaataaaggcgtagaaagagaaccagttctcactctacgcctttgttattagataaattatgaatttacttcacttcccaagtatcattagtcatcaacagctcttggaaattgtggtatttctttttgcctttgatttcttcgatttgttctgtaactgcatcattgtaggtcggagcatctacatcgcggattacaccgagtgcaatcgggaagtcgggaccttccatcaaggccagtttcagttgaagtgtattgtcctggcagtgtgcatcgtggataagaatatctttttctgtgataccgttttcaccgagtttcactactttcagtccgaaaccttcctgcattaatccgaattctttgttttcaccgaacaacatcggtttaccatgttccagatagatcgcgttcttggcacgtccttctttggttgcaacgctggcatgagttccgtcgttgaaaataacacagttttgcagaacttcgacaaccgaagcacctttatgagtggctgctgctttcaatacttctacggaagcggcaccgtctacagcgatacagcgtgcaaagaaacgtccacgtgcgccgaaagcaagttctgccggatggaatgggtcttctactgttccgtaaggagatgatttactgacaaatccacgttcggaagtcggtgaatattgtcccttggtcaaaccgtaaatgcggttgttcagcagaatcatattcaagtcaatgttacggcggacagcgtggatgaagtggttaccaccgattgccaggccatcaccgtcaccggaaatctgccagatagtcaaattgggattagctactttggctcctgttgcaatagcagctgcacgtccgtgtatagtgtggaagccatacgtatttacatagtaaggtagacgggaagaacaaccgatacccgaaattacggcaatatcatgcggagctgttcccaattcggccatagccttatgcagtgaattcaggaaagcgtggtcaccgcatcccggacaccagcggggctggcctgatttataatcttgtacggtatatactttatcgctcatctcttattcctccaataatttagtaaatgcatctatcaattctctcgtaacgaaaggctgtcctttcacttggttgaactggctgatgttcagtccgggcactttcatgcgcaggtaacctgcaaattgtcccaagttctgttcagctaccacgatctttttatatttacgtaatacgtcagccgtgttcttcggtagcgggttgatgtattggaagtgggcgaaagccactttctttccatgttcgcgcatatagtccatagccagacggagatggccgtaagtaccaccccagcctacaatcagcaaatctgcatctttgtcgcccaatacttcgagctcggggatgtagtctgcaattttgtccactttggcttgacgaaggtgaaccattttattgtgattttccggttcggtagagattgcacctgtttcgttactcttttcaagaccaccgatacgatgcatgaagccctctgttcccgggatagcccaatagcgtacaccagtttcttcgttacgttggtacggagtccagtttcctgccatatcaggagttacatacggtggattgatagcaggatattcatccaagttaggaagtttccaggctgcagagccgttggctacaaaagcatcagtcaacagtacaaccggagtcatgtgttccaaagcgattttagctgccatatatgcagcatcaaaacagttggtcggtgatgttgcagcaatgacgggcatcgggctttcaccgttacgtccgtagagagcttgcagtaagtcggtctgttctgatttcgtaggaagaccggtagacggtccgccacgctgtacgttgacgatcactagtggaagttcgccgataacggcaaggttcattgcctcacttttcaggcagacgcccgggccggaagtcgtagttactgccagggcaccggcaaaagctgcaccgacagcagatgcacaacctgcgatttcgtcttcgcactgtacggtttttacgcccagtgatttatgtttggctaattcgtgcagaatgtcagtggccggagtgataggataagaacccaagtagagttccagaccagctttctcggctgcagctatcaagccgtatgacgttgccttattaccattaatatctgtataaagtcctttggattttggagctttgctttcgatcttataagtagagacagaagcgtgagtgttggctccgtagttgaaaccgtcgttcaataccttgatgttggcttctgcaatttcgggctttttggcgaatttctcgcgcagcattttctcggctgctgccaggttacggttgaacaaccaacaaactaaccccagcgcgaacatatttttacaacggagaacggatttgttgtccagtcctgaatccttcaggctttctttacacatggaagaaataggcacttcaagtacttcttgcttaacacccaattcttcgaaaggattgtcagtcttgaattgtgccttttctaaatctctggcttcgaatgagtcggagtcggtgatgataagtccttgcggtttacagaatttgatttgtgtttttagtgcggaaggattcattgctaccaatacgtgacaacggtctccgggagtgtaaacttgcccggcgccgatgtgtacttgaaaaccggaaaccccggttaacgaaccttgcggagcgcggatgtctgccgggtaatcggggaatgtacagatgtcatttcctaccgtagccgacatgttcgagaagatgttgccggccagctgcatgccatcgccggagtcgccggagaaacgtactacgacttcctccaattctttaaccatcatttcgtctgccataatttttattactatatttaatttaaaaactatttttactttcaatttgtgagcgcaaaggtcggaaagttaatcgaattatcaaaataaatcagtctttattgtcctattgacgctgaatatttgaagtgtctggaaggaacctttatttttattcttgttaaatcaacagaaaccgttatctttgcaagcaaatttataacggccttgtagttcaacggatagaatagaagtttcctaaactttagataggggttcgattcccctcgaggctactacaaagaggaatctataggaagttgtgttgtaggctttcatgctgtatcaagttttaagttttacaatagcttctttcaagattaacgtcttatagcttatatttgttttaataatcaatagaaaaagcctcttccgaacatccggaagaggctttttctatttctggactttattattcttccgtagctgccggtactacaacttttttgttcttcatcatgttgtatgcaatcggagatgcaatgaacagtgaggacaatgtaccgataacaacaccgagaatcattgcgaatgcgaagctgcggattgaatcaccaccgaggatgaagatacacagtaacacgatcaatgtactcaatgatgtattgatagtacgtgcaagtgtagtgttcaaagagtcgttgaacaactgacgtttgtcacgtttcggatacaggccgaagaactcgcgcacacggtcgaagattaccactttatcattaatagagtaaccgatagccgtcaggatagcaccgataaatgtctggtcaatttccagagagaacggcaggatgccccagaacagtgagtaagcaccgataatcataatggtgtcacaactcaaggccacaatagagccgatactgtaagcaatgttacggaaacggagtaggatgtacaggccgatagcaagcaatgccaatacaacagagtagatagcacctgtcttaatatcgtctgcgatacttggacctactttctgtgaacttacgatactaccaccggtatgattgtcacgatcgatgaaagtttccaaagaaatgttttgagtcagtaccggtttcagagtttcatacaagtatgattcaatttctgagtccacgttgttacctgcatcttcgatgcggtagtttgtgctgatacgtactgttttcttatctgtaccgatagcgataacacttacgttagcatcaccgaacttgctggcaattagctcgcgtacttgttccggttcaaccgggttttcgaactgtaccttgaagttacgtccaccggtgaagtcgatactctgactcaagccacggattgcaaatgagctgatacaaacgataattactgcactgacgataataagggacttcttgttcgtacccataaaatcgaaacgtgtattggtcatcaggttctttgaaatcttagttgtaaatgtcagccccagccacttatctttactcatgaagtgttcgtaaaccagacgagtcatgaacacagctgtaaagaaggatacaaggataccgataatcaatgtcgtagcaaaaccacgaatcggaccggtaccgaagttgaataggatgatacctgtgatgatagatgtcaagttagagtcaaagatagccgagaatgcgttggaataaccgtcagcaagtgctttcttcactcccttacctgcgcgaagttcttcttttgtacgttcatagataagtacgttcgcatccactgccatacccagtgacaacaccataccggcaataccggacattgtcagcgcagcctggaaggacgaaaggattcccagtgtaaagaagaagttgaggatcaatgccccattggcaaccatacccgggatgatgccatacatagagcacatataaatcatcaacagaatcaaagcaacaacaaatgagaagatacccgcattgatagattcctgacccagtgacggacctacgatatcttcttgtacgatgtgagccggagccggcatcttacctgatttcaatacgttagctaagtcctttgcctgctccggagtgaagtgacctgtaatctgtgaacgtccgcctgtgatctcagtgtttacgttcggtgcagaatatacatagttatcaagaacgatagcgatagcacgaccgatattctgtttggtcagttgagcccaacggcgtgcaccgtcagaattcatagacatgctgacagccggtttgctgtactggtcgaattcgtctttggcatctgttactacgtcaccttccaacggagctttgccgttgcgttcggtagatttgattgcatacaattcgaaagtctgaccttttttgtcaaattcggaaggagaaacaccccatttcagacggaggtcttttggaagttctgctttgatttccggcatagccagatatttgttaatgtctgcagtgtccttgtagtttgcatatccgataaccgggccctgcccactagagtttaattgcagtatagacagcaaaggatactgtttcttgatctcttccatgttcgcagcagttgcatcatcttgtttggcgtctcctttcagagcggcagcaaggctgtcggcagcacttacggctttcttagtcggagttgcttcggtaagaacagcagcttttgtagtgtctgttgtaacagaatcagtagttgtttcctgagttaacactgcacgcaatttagcgtctgctgactgcatagccggaagaatttctttggcggtatatgtttcccagaattccaggttagccgaaccttgaagaagttttctcacacgttccggttctttgatacccggcaattctaccatgatacgtcccattttgtcttccaggctctggatgttcggttgaaccacaccaaagcggtcgatacgggtacgaagtacgttgaatgagttctcaacagccgcttttacttcttctctcaatactttttcaacttccgcatccgttgatttctggctaactttgtctttcaactgttgtgtagcgaatagttcggaaagtttcgcgtccggagcaattctgtggtattccttgacaaacagggtaattacatcatcctgactgttgatagcctgttttgctgctgttgccaatgcgttattgaaagcttcgtccggcttgttgtcagccagtgctttaataacatcaggtacagaaacttcaaggataacattcataccacctttcaggtccaaacctaaactaatctccatttcacgacattgtttcagcgtccagttacccagccagaccttctcattggagagagagtcaaggtagtcttgttctactttcatgtcgccgttcgcaatttctttcgccttgttgttataatggcgtgttacgaaggagaaggagaggtagaacacgcataccagcgtgagtaataccgcaaaaacctttacaaatcctttgttttgcattttacttttaatttatgatgattacttttttaatttaattttcagttaaattctgtcgtacacaagttctttttgccgcatacaaggctgcaaatatagtttttttttcacattcatgtgtaataagccctcaaatatttgatgtttaagggcttttttaccgatttatttcattcctctgtttttcagcagtggctccatgctcggttctgtgccacggaaatttttgtagagagtcatcgggtcttcgctgtcacccttctccaacacgttccgacggaacaattcggcggtgtttttgtcgaagattccatgctctttgaaagcttcaaaggcgtcgttatccagtacgttagcccacaggtaactgtaatagccggctgcatatccgccgatgatgtgattgaagtaagtcacacggtaacgtggggcaatttcagagataagattgagcttgtccatagcttctttttcgtacgaaacagcatctaaattctttacatctttcagcatgtgcaggttcatgtcaaggatagcggcagccagcagttcggtagtcatgaatccctggttgaatgttttctgctgaagtattttttcgatgatttcatcggggattactttaccggtagcataatgcttggcatacattttcaacacttccggttcggttgcccagtgttcgttgatttgagagggaagttctacaaaatcacgtacaacattggtgccggaagttcctttgtatttgcattgggtgagcaagccgtgcagtgcatgtccgaactcgtgaaacagtgtttccacttcatccattgtgagtagagaaggggtgtcacctatcggtttggtaaagctgcaaacattgcatactagcggacggattggcccactttgttcgcggtagttgctcatccatgctccgccgctttttccaggacgtggaaagtagtctacatagaagataccgagctgggaaccatcggcgtcttttacttcaaacacttctacatcagggtgataagtagggatatcttctagcttgcttagggtgataccatatagtttattagctacggcaaaagcaccttcgcggacattttccaatttgaagtaaggtttcgtgtcttcttcggacaggttgtatttctcttttctgagtttttcggtgtagtaccaccagtcccatgcttccagtttttcacctttgccttccttgtccataagttgctgaagttctgcggcctccgatttcgcttttggcagggcgtagctccatagattattcaggaggtccattacgttattagcatttttagccatggtttcgtctaacacgaagttggcatagcaatcgaagcccaataagttcgccttttccagacggagggaaatgattttgctgattacttctttattgtcgttcttatcgttattatttccacggttgatatatgctttatacatcttctcacggagtgggcggttttctgaatactgcaggaagggcaggcggctggcgttatgtagagtaaacaaccattttcccggttgtccggcagctttagcctcttcggcggcactttggcagaaccattccggcaggccggcaaggtcttcctgcttgtcaacgaaaagttggaaagcattattctcgttcaatacattgttgctgaaggtgataccgagtgtagaaagttccttgttgatttcacggagacgggcttgttgttttgtgtcgaggttggctccggagcggacaaagcttttataggtcttgtctagcagtcgttgttgttctattgtcaggttcaatgagtctttttgttgatagacatcgtttatccgtttgaaaagtgtctggttcaaggaaatattatcttcgtgttccgaaagaaccggagccagtttgatagacaactcggtcagcgaatcggtcgtttctgcgtctgtcatattgaaaaagatagcactgacacggtctaaaatgggagcactgttgtccagcgctacgattgtattttcaaatgttggaacttccgggctctcgatgatagcctcgatgttctgattttgttcttcgatacctttcaggaaggcgggttcgtaatgttccagtttaatcttatcgaaagaaggaacaccatactctgtttgaaactctgtaaagaaaggattactttctgtttttgtagtacaggagtacatcatgcaacttgcagctaaaatggttagtgttttttttatcatcataagtgttttatattagagtttacagttcttatcgcttgctgatatggcaccagatagggtagtggtccgaagcctttatagatcggtctacggtgcagttataagctttcaggttagggcttatcaggatattgtcgatacggaaatagaatttgttctgattatacgagattcctaatcctttgccggattgggtaaatgcgtcgtccaatttttgagtcaggatacggtgagtatacgagatagagccgtcgttgaaatcaccacacgctataatagtcggatatttgctttctgtaatggctttgtttacggagtctgcctgcgaagcgcggatggctgacgcttccgctaattttttgaccagttgccgaagtccggttttgaccttcttggcgttcgggtccttaatcatatcctcatacattccccggtcttccttggtaagtttgttggactccaaatggttgttaatcagagtgactgtgtcattattcactgccagcacatatttgacggaaccattgtatgtactttcataatcaatgggagatactgaaagtatgggatatttagaaaaacaggcaagctgtacgtcgcttctgttttgtcggcgaacggaataatagggatatgctttcaatgcttttttgatgtctgcttctgtcagatatttcttattctgcgctgcattatattcttgcaaacagataatatctgctttgctgttaaccaggtatgataagattggattctttccgtctttcttttccaaattgctgaaattcattacattataagaaagaatttttatacttccttccgggattgtcttggtagtggaattgaaaggaatataggtccttatctgcggaaagcaaaccaaaaaaccgattagcggtactaaagcataccggtaattgatgaatacccagaaaatgataaaagcgatattgattaccaaaaatagtggaaatgcaagccccagtccggaggaaagcggattcaatttcggattaagataaggactgtaagcgctcaatatcagcgttcctacgaagaaagcgttgatagctaatatcagatatgcgacaattttgccaatatgttccatcttattatcttttgcttgcatcgaacaagcttttcttttcctccgtcgtcagactgtcgtaaccggattttttcaatttatccagaatgcggtctatttcgtcggactgtgcttttttatgggcgttgtaatcataatctttttcacgactggtcgtgcctcctccgtaatgtactttcattttgggtttgtgtttccatgtctttttctggaatagagagataaaagcgtccagaagccagttgatccatgcggtcagatccgcccctttgcttaggctggcggcaaaccaaagtccggcaagagcaccgcccaagtgagcgatatgtcctccggcattgcttgacgtgatagataatacgtcaattcctataacaacgagtgccagatatttgagacggattgcgccgaaaagaaagagttgtacccggtaattgggctcacggtaagcagtggcagccacaatcgccaagacggaagccgaagctcctactagtgtagaaactgctacttcctgattgaacaaaggaaatacattgtaagcaaccatatataataaacctccgaggatacctcccaatatgtacaaacctcttaaatgctttgctgaaaaaaagtgtagaaacaagcttccgaaccaatacaaccagagcatattgaataggatatgcagaagaccggcgtgcatgaacatataagtgataatcgaccacggttgatgaaagaaccgaataaaggaagccggtaaagcgaatatgccgaatatatcgggtatactgtgctgaaatagttgcaagaaaacattgattaacgtgccaatgataaaaatgcttacgttaatgtaaatcagctggataaatatattccctcttctgaatgtctcttttaaatcagttataatatgtcccattgtttttacttttttttctccaatacaaaatcagaataagcccgaatagcattccacccaagtgagcaaaatgagctacattatctccggcactgttggctagtcctgcccataactcaatcgcagcatatccgataacgaagaatttagccttgatagggaaaggcagcgggaagataaacagttggttgttgggatacaacattccgaatgccagcaaaatggcgtaaacggctcctgaagcacctacggtagtcatcatgttgagatactggtccatagaaatgatgccgtaacctattaagttcacttccgtgtgttggctcagttccgttatgtactgaatatattgaaccccttcctgaatgagtcctgcaccgataccgcaaaggatatagtaaaacaggaaacgtttgggaccccaggtttgttcgagaatcggtccgaacatgaaaacggcaaacatattaaaaaatatatggctgaacccgccatgcataaacatgtacgtgatgagctgtgccggattgaaatcacttgcgaggaaaaaatgtaatcctagataattagctaaatctataccgtaacgttgggctacaagcgttccgaaaaatactaatacattgataattatcaggtttttagttacagttggcatcattttaaattctgaatatttagatactagatgcaaaagtacgaataaattctgttttaaagcatgaaaaagacttcctattagctctttttcaataaattgctgcgttttttttatgtttttatttgatatgttgttttgttcggctatatttgtagaatcaatcccttgtaggataatcttttgtgtaacatatatattaattaatcattttacgtattatgaataagtctgaacttattagcgcaatggctgctgaatctcaaatgagcaaagccgatgcaaaaaaagcacttgatgcttttatcacttcagttactaatgctatgaaagctggcgacaaagtatctctcgttggttttggtactttctctgtaagcgaaagagctgaaagaactggtattaacccttctacaaaggcaactattactattcctgcaaagaaagtagctaagtttaaagctggtgctgaattgtctgcagctgttgaataagatatcatagttgaaagaatttagaaagaggagacgtatacgtctcctttttttgtatctttgcgcgcaagaaacaacttgattatgaagatagaagataaacttgtagcgtccgtcattagcggactgaaagcactctacagtcaggaagtccctgaaaaaatggtgcaaatccaaaagaccaaaaaagaatttgaaggacatctgacgctgctcgtgttcccttttctgaaaatgtcaagaaaaggaccggaacagacggcgcaggaaatcggtgaatatctgaaggtgaacgaaccggcagtagcagcttttaatgtgataaaaggtttcctgaacttgactatcgcatcggctacgtggatcgatttgctgaatgaaattcaggctgacgaacaatatggtctggtgaaagctaccgaaacttcgccattggtgatgattgagtattcttctccgaatacaaacaaacctcttcatttaggtcatgtgcgtaataaccttttaggtaatgcattggctaacattgtggcggcaaatggtaataaggtagtaaaaacaaatatcgtaaacgatcgtggtatccatatctgtaaatccatgctggcatggaagaaatatggaaacggtgaaaccccggaaacttccggcaagaaaggtgaccacctcgttggcgattattatgtatctttcgataagcattataaagcggaggtaaaggaacttatgactgagtttgcggcacagggaatgagtgaggatgaagctaaggcgaaagcggaagctgcttctcccttgatgcaggaagctcgtgaaatgttggtgaagtgggaagccggcgacccggaaatacgcggattgtgggaaatgatgaataactgggtgtatgctggatttgatgagacttaccggaaaatgggtgtcagcttcgacaagatatattatgaatccaacacttatctcgaagggaaggagaaggttatggaagggctggaaaaaggtttctttttcaaaaaagaggacggatctgtttgggcggatctgactgctgaaggtttggatcataagttgcttcttcgtggcgatggtacatctgtttatatgacgcaagatatcggtacagctaaacttcgctttgcagactatcctattgataagatgatttatgtagtaggtaatgagcaaaactatcattttcaggtgctttctattctgcttgacaaactcggttttgagtggggcaagagcttggttcacttctcttatggaatggtagagttgccggagggcaagatgaaatctcgtgaaggtacggtggtggacgctgatgacctaatggaagaaatgattgccactgctaaagaaacttcacaggaacttggcaaattggatggtttgacacaggaagaagctgatgatattgcccgtatcgtcggtctgggtgcattgaaatatttcattttgaaagtagatgcgcgtaaaaatatgacgtttaatccgaaagagtctatcgatttcaatggtaatacaggcccgtttattcaatatacttatgctcgtattcagtctgtgcttcgtaaagctgccgaatcgggtattgtggttcccggccagattcctgctggtattgaattgagcgaaaaagaagaggggctgattcaaatggttgccgactttgctgttgttgtcaagcaggcaggggaagattacagcccgtctattattgcgaattatacttatgatttggtgaaagaatacaaccagttctaccatgacttcagtattttgcgcgaagagaacgaagcggtgaaagtgttccgtatcgctctgtcggctaatgtggccaaagtcgtgcgtttgggtatgagtttactgggtattgaagtaccttccagaatgtaagacattctctgaacaaaatatctttctacggggtttcttcattatgtatataatgaatggaatcccattagatcattttataaatatgttgcgtgtcatatgattcccctctctctttgtttgatagagtgtataccgataggggatttaaggtaggataaagtaaaaaagaaaggcagacaaagttcaagccttgcctgcccgattctgtttcttatgctgataattgttatttcttaggatacttataccagtctttagcttgtgcaccattagatttaacccatgtcgcaaacttcggatacgattcgtctattcttataccttcctcggggatcgggaattcactaaccggcatattgagtgcaaacggcatcagatctattgaaacataatataaatcttcttctggcctggatacgtcttttcctgttcctaataatgaaagatcggctttatcagtaggaggatattttaccaagtgcacttctctacctctggcttggccagatcctacgaagataaacggattgtaaggtggcaatatacttttcgaagtaacatcatttacttggatagttacagtgtatttcctggctttttcttctttattatcaaatattgccatattatcaaatagcaagattgtaggatgtgattgaccagcctctgtttctccgggcatatattgggatttgggcgcatacgaagggctttcaatagtaactttgctaatatcgctattagtagtgttatgcaattgataaccaaaaccattcactaaataacctccacgatgtaatggagtgaactcgtcaacaaccttatagatacgattagtcagtattgatttatatactttactggtatatcgtatcattacgtcattcatatcgtaatctccctgctccggccataagtcttcgaatgtcaatatcccggaataagaagtatagttgtcttcatcagttggaccttccggatctgttggtaactcgggaattacaccttcatcaatagcatctttttcggctatgtgaacatagaaaattgcatcacagtaatcgaggtctatgttgtcctcaaatccgatagcaacaatctgattagatttactgtcccgtaacgatatggttctttgtctttgtacgccatcctttcccggttcattcaaaattgtggtggagtatcgagggcccattccttttacgagatcgccttgtgaatctccgtttgaaggtgtgcttctgaatcccataccttgcagataccagccaatagtgacgcccttaggaaatttgtcttcaaattttcccgtgtcttcattccagtattttagtttaacttcatcaccacagactaaagctcctactccggctgttttataaataggagaagcatttgggaatgctaatatccttttgatgttttctatggtcggtatttcgctggtcggataagtgtaataccctactgtattataccatgcggcactactgttaacaaatactagactaacttctgtatctttagtgatagggatatctgatatcatatcaccattaaagaactcaggatagttatcatgaatgttccttcctcccgctttgtcgaagatgctttttatattataaagtacatcagcaggaggaatattcttttcttttgataagttattgggacgtccgttgtcatcccagtccataccaggcagcagtgtccagacatccaaatatttgtgctgattggctgttgtccctctgcttatcggggttgatgctttttcaagcagggacttaacatagtcattttggttgaaagaaatacgatgatcggcgttaattgttagttttaccggagatgctgtacctagatagtcggatgatagccatacttctgagatatcagccggtatacttattccatcttcactaaatttaccatgtttgtcagttgcagcccgataaaagggttctacttcttttttcttccaactaccatctttgtcatttacttcgatcggatcttggtcataaatctcaaaaagaaccgtatattcttccttaaagccatagtcaatatctaaggctaaactttgattcatgtcgaaatcaaagaactgttctttgggaatcttctcgggttcttgaaataaatcacgttcattgtctacacaactacatatcaatgggatacaaaatatgcccattaatgtctttacaaatattgtttgtttcatatgttaatgaaatataaagatattaatgggcaaatatagaaataaaccgaaagctttccaaaagatatttacctcttttttgcaaatttcttttttggtgctgaggtaacacctttctcgtcctgtatcctgattaattccatgcaactatgcaggcttaaatcttgtgggacaatatctttaggaatcttatagttattacctttatatgctatatatggtccgtaacgaccattcagaatttccaattctggttcttctgcgaacttcttgatgtggcgttcggcttcctttgtgcgtttctctagaatcagttgttccgcctcttctaaagtaatttccatgggatccatcgttttcgggagcgatacatacaccttattatgtagtacatacggaccgaaacgaccaatacctacactgactgtctttccttcatattcgcctaacgtacggggcagcttgaacaattccagcacttcttccaatgtgatcgtttctatggactgaccttttttcatttgtgcaaaacgtggcttttcttcatcttccgccgtaccgatttgcgccataggaccaaaacgtccgatttttaccgaaacaggtttacctgtttccggttcctcacccaaaatacgttcgcctactttatgttcagtctttattgccaaagtgttttctactgacgggtggaattggtcgtagaaggttttcagaattgaagtccatttcacttctccttcggcaatttcatcgaactctttttctacactagctgtaaagttataatccagaatatcagggaaatattcggtgaggaaatcatttactaccgttccggtatccgtagggaataacttggccttttctgttccggtaatttcagtatgattttcgtctttgacttgttggtcttttaatgtcagcacattgaacatccgttcttctccgtctttattgcctttttccacatattcgcgattctgaatcgtggaaatggtaggcgcatacgtagatgggcgaccgattcccagctcctccaatttacgtacaagacttgcttcggtatagcgcggtgggcgttgggtaaaacgttcggttgcaacgataggaccgtgttccagtttctgaccttttttcagaggaggcaacagattactttcatcctcttgttcattttcatcgtcataagattcacggtatacacgcaagaatccatcgaatttaataacttcaccgatagctgtaaagacttcactactactgctaattgatattgtaacagttgtcttttccagttccgcatctgccatttgtgaggcaatggtacgtttccatatcaagtcgtacagttttttctcctgcgctgtcccttcgatggactggttttccatataggtaggacggattgcttcatgtgcctcctgtgcccctttggttttcgtttcaaagtgacgaggatgcacataacgttcacccatcattttgatgatagcatccttactgcctatggttgcaaattccgacaagttcacggagtcggtacgcatataggtgataaatcccgattcgtacaaacgttgggcaatcatcatagtttgcgccaccgtatagcctaatttgcgtgcagcttcctgttgcaatgtcgaagttgtgaacggagcaggaggtgttttctttaacggacgggtagtaatatcttcgatagcaaaattagctcctttacatgcgttgaggaatgcttctgcttctttcttcgttttgatacggtgggccagttcggctttcatctccactagtttcccatcagtgtcgggcacaaggaaaacggcggtcacacggtaagctgcttccgatttgaaagcatggatttcgcgttcgcgctcaacaatcagtcgaacggcaaccgattgtacacgtcctgccgaaagcgccggtttcacttttctccaaagtacaggagacagttcaaaacctacgatacggtccagaatacgtcgtgcttgctgtgcattcacgaggttaatgtcaatatcacgtggttgttcgattgcttttaagatagcacttttcgtaatttcatgaaatacgattcgttttgtgttttccggttttagttttaagacctcatacagatgccaggcgatagcctctccctcgcggtcctcatcggatgcgagccatacggtttctgcctctttcgcttctgctttcagtgtgctaaccagagcctttttgtctgccggaatttcataattgggtttaaaattcttctctacgtcgatactgaactcttttttcttcagatcgcgtatatgtccgtaacttgaaaggactttgaaatctttcccaagaaacttttcaatcgtttttgcttttgccggagactcgacaatgacaaggtttttctgcataattctttcttttataatggcttgtaccacaatatttgggcacaaaagtaaaaaaaaagattctccctaccttataatataaggagaatctaatgttttttagtaaaataacgtcagcccgatataaatcagttataactataaattttctttttcagcgtataggagtattcgtaggaggtggaagaacataccaacggttatgttaaattcatgtttaaataggttcgaaattaattcgtattttatatacggaagaaaaagtactctacttataattagaatttgaaataaaatatgttaagttaataatctgcttcatttgaagtaaggtcaacaattaatggatttgttggtttttaacaatactgcaaagttagatgaggtgtggaaaacagatgtgcaatattctccaaataaggtgcacaaaatgctataaaacgctttgtgatagtacaggaagccacttttgaagttgtgggtaaatatgtttacattcactaggaaaacctatcggataaaataaaatgttggttagtatagattaatatctgtatattctacgtacatttgtctcgttagtattttagttttcgtttaacaactgttgaactatcgatttatatatgttgaactatcgtttgacagttgttgaacgaaaactgactagacgatgaagtaaatagtatatgaggatgaaaagaataatcttccccaatgaaaaacaaatgagtaatgagtgttaattatgacctttacgaaacacctaatcctgacaaggaaggggaagtgttgcctttacatgcacgtgtgctattgaagggtagttatactgccgaagaatttgcagatcaagttgtagcatttcagcatatgcctcatgcgcaagtggtgggtatcatagaagctatttcgaaagaattacagcatttgcttttgaaaggattttccgttgaattgggtgatattggctattttactctttctttgagtgtggacaaagaagtgactgagccaaaatacttgcgttcaccatcagtatctcttaaagacattaatttgagaataaaccgtcagtttaagaaggatgttgagagtgaattggtattgcaacgttatcattctccctttcgtgtgaagaatccgtgtattaaccgacaggattatgcttcacttgtcggaaagacaaaaacacaggcattgaaagatataaatgcttttattgggcaaggtattttgaggaagtatgggacaggacgttcggtggtctatataaaggctgaataaaataataaaagaatttttgcgatagattagaaagataaaatctgattgataaaactagttccggcttaatctattacacacgtcaatgtagtcagattaagccggaactgattttaactctttaataaagagtacatctatattctatcactctttactcttgcataataacttctcctacgactttgattaatttgagttcttcctgatatgcatcctgaaatagttgccagatcataactccgccaaaatcattatccattacatactggcattttttccggatagttggtcgtccattataatatgttttaccgaattggtcagcatcggctatttcttttatatcatacgtctttccgaaatgagtaagtattccattaaagcggatagctcctacttcatccttattgacatcattgtcccatgaatagccatagaatggcagaccgccgacaatctttgattttggagcttggaacttggttatccagtagttcatatcatttacaaaatcgttgtaagaggcatgttgtcccggtgtggacgagtttcccattaccctgtcatagctcataatattgatataatcaaagtactcctgccatttagtggtatagtctttccagcagattacagcacaagtcattaacatatcggcacttttggcttcgtgtaaagcttcggcgaaagctacgagtgagttcgtgttccagtggttataatcttcgtagtcaatatcaaatccgtcgagctggttggcttgggtgaaattcacaatgttggaaactaatgcgcttcttgtttctgcattgtcgatagcagctgcaaattcaccattactgtttttgttaagagaaatcagcacctttaccccgtgctcctttgcttttgtgcggatttggcgtagtttattttctggtaccttgtctgtatttagcgtaccgtccgatttcacatgtgcgaaacttacgttgatgtgtgtcagatactcccagtgaatattatcgaattgcgcatcaaaatcaaagtcatgtgcaggcaaataaccgataacgaccttatgtgatgtctccggctcttcctgtaattcaggaagcagaaccgtatattcggaggttagttgatagtcgctgcttgtcacggtgaactgctgttctgtttcccaacgtttcactttctggggatcgggggagatacttgctccccctgataattgataattgactcctgtgattgcctttctgtttgtaataccgctgatacggattactttgttttcatcattgatgtttcctctgtaataagtaccaccgcattgtaatgtgaattgtgcgattttggcttccggtttgccggctattgcttccgagtcgttgcaacttatacatacggaagttatcagcataaatataatttgtagtaatatcttcattttctttctttttgagtgattaattgttattcgtctccccattctattggagcggtgtattcccaccagtcgtaggtagctgttcctttagctacccccagaatgatttgggcgttagtcccataagctactccggtgtaggaagggatagaacgtagtagtgctccgtccagatgccattccagtttcatgcttccactgggggtaccttccagaatgttcatttccacggtgtattcggacttcttgttgttgaatggatattgtatgacaccaccgtcggaagtaccgcaacgggcattctcaccttctcctttgaagagcatccaccgtatctctttttctccgtagaggaagtaaagctggcattgggcatcgttgctgcttgcgctgatgtggaatttgtaagagcccggtttcatgccctcacgggagatacggcaattggttccttcataggcaaagtttactgcgccgtctgcgaataccggtttgccggcagtaatagtccattcgttatccacaaaggaatgacgttccgcttccactttattcccttgttttagagcgatgactttcacgataggttcgcttccggcctgtgccttactggagattcggaaagttgctttcagtacggacgaaccggtgttttcctgcaagttgattactatatcatccgttccattgtactcagtttttgcaaatgaataccattcatcttcttcattttctttttctactatccattctccgttggattctacatggagtgtgactgttgcatcattgtaaagtgcacgtaggctttgagtggtcggagtgagtacaacacctttctgtgtacattcaacgtttgccacttctttaccgtgacggtcatatatgactactatcccggagcgttgttcccctttgttttccaaggctttcagtgttaccatgccgtcgagtgttccgttttctccggattgtatagagagccattcgtcgccttcggtgactgctgccgaccagttctggttggatttaacattgaatgagcaggtcgtttcttctttttcaagcagtaggtcgtctgcgttttcgagcgttaagtaagctatgcctttttgtataatgcttacctctttgccaatccagtaatcacttttgatagtgacggtatctgtacgatcgtccaatgaggtattgggggtataggtgatttgtacatcatagagttcattggcttcgccctgattcggtgaaatagtgcaccagtcactgtgattgctgtaaacaatccatggatcggttgattttacctggatagagactgtttcttcaccggaagcggcaatggtgtaactgtccgctgctttgtagcgtaaatctacccatttgataggttcgtcgtctttacaggactggacagaccacgagctgatgaggattagcgtacctagtaaagtacgccaattcattatgttatgaacaagttgttttttcatatattcgtcttttcaatttttattcaatattggtgacttcgtatgaagtgatagtcattgtacctttttttcctgctgttcctgcgataaagccaaaataagggaaattaccagccgaacctgttgtttcaaagagattctcatattctggcgttgtgatgatttgggtccaatcagtttctccctctagcttaataaagacctctattttagcttttgttttattatccggagtagaataagtgtgagagacctttagagcttttagtttattcaggtcaaatggagtacatttatagtcgtcattcgagcttccacctctatatttgaaagtccaaggattggctccaacccctaaccaaaaattccatccgggaattggtgaggcaacacaattcatatttaaacagcgattatcatccacttcaatgtttgagaagtgccatttgtgaatagctaatttccgaggtttattgatgtaataacgacaattggcatttcctgtttcttcagtgaaagtgattgcgcctgttgcttcatctatggttccgggagttccatttaattcgtatgaacctccagcctgccttacttccagagtcgttgcttctatacctaatgttttatctgtcggagttaaagaaattacagctttccgggtcgtgaaatagatttcagattgactggttgctgttatattaccgtctatacttttttcaacttttagccaagtggcgtcagatgatacttgccaatctacgtttgcaagtacttgataagtttttgtttctttatcttgaccaccgtcgaaagttacatctgtggtttctgcgaattccagcataatcccgttttgtgtggctgtgatttctgtttcatatccttcggaaacaatggtcagtgtggctgtacgtttcaaacccgtattgggtttagctgttgctgtaatggtaaccttttcgccgttaccttctccctcttctttgtcaagtgtcaaccactgattggaactggttactttccacgctttattggaagtgatggtaaaggtagcttcaccaccttcactcgggaacggatcatcgaatccttgtacgagcagtgttcctttcgctgcttgtgtgatagtgaccgttttgctctcctttattctgtctgcggtgatagtcaggatagccgttcgctcctgttcatccggattttcttccatgatgacagagacttcggcgataagtgaacttgctgagctcattgccggagtaggtacgcaccaattcttgttgctttcaatcttccagggagtattggaactgatattgaaaataatcgtattcggggatttggctaatacggcatattccgattgggcgtctgtctctaatagaggaggaaattcggcttgagagtcgatgttgaattcctggcatgaattcaggctgaatgtacatactactgccaaacagcataatattgtataaaatgatagctttttcatatagcgtattgtttttttattgatgatataaatagattaattggtcaccaccccgtattctgaggattcaggtttttatttttgaataactcgctttgcggaataggatagagatacatccgttggctccatgtcctacttttataaagcgttcgttggaaattccatgtgccgtccgttgctctttcgatgtttacgccgtagagctccttttgggtgtcctccccaatttgccacctgcgtatatcccagaaacggtggtcttcgaaagcgaattcaacacgccattcattctgcaacgctttcataaattcgttcgggtcggtaatggatacggttggcatgccggcatttatcctgacttcgtttagcgcccattccgctgatttcgggaaatcactgttggtatattgtgggttcttaaatgccattaccatagattctgcgtaggtaagcaatgtttccgcatagcggtagacaatccagtgatgtttgttgactacttctttgtccgcttcgaaactggtagtctcttggatatatttccgtaagaagtaaccggttggcgaaccaccttcggaaacagatgtataatcacttccacccttatataccgcaatttcggaacctttgaatgtcataccattggccagaattgtgcgtccgaagcgtggatcacggttggcgtacggattttgcggattgaaggccgggtcttcacatttccaaccattatcggtcagggtgacaggataaccattaacggtttggaaggcatctactagattctgtgaggggaatgtggcagtggccggtgtggagcgtgttccttcggtgaaccgaatcgggaagttattacgctcgaacgtggcgctatcaccgttcatgtgaaataggacgacttccggtgaagaaatattatttgctttctcattcggatcgagttggtataagtctgtcttgataatgtcataggcagctttggcggatgcttcccatttctcttggttgttggacgggttgtgctgtttgcttgctgcatatagcagggcttttgacttcacggccatggcaaagcctttggtgattcgtccggtttcgttattaggctgaccgacgtatgttgcgggcagattgtttgcaccgtcttcacattcggatacgataaaacggatcacttcttcaaaaggggttttaccgatagcgtttgcctcttcggtcgtaagagttttcaacggcatggcgatgtctccgtatctgcgggcaagctcgaagaagtagtgggctctaagcacgcgtgcttcatacgggaagtaacccagttgcttcatccagttctcataattggtgttatactcatagcgcgacaggtctacgtcttccaatgattgaaggaattcattggctgcgcggatgcctttatatagtgtccagctgtcatcgcgggttttaatagccgaccagttgccattggtcatatcctgtatgttgcctcccgttgctccgaattcggcatcatcactggcgcaatctctcatcgctcccccaatgacgccaaaatcttgcggcataaaggtatatacatgggtgagcatttgtttggtcttatcgaaataccggtaaatatcttcccgggtatttaatccgttcgtttcatcgtaatccagataattgcaggatgcgaatgcgatgatagaactgtatgctattatgatatgtttaattttcatatatcttaattgtatttcgggttaaaagttgaacttgattcctgcccagtaagagcgtgtggaagggtatatggctcccaattgttcggggtcggcaaaaccgatattgtccagtgagaagaggttgcttccttgcaggtaaaccttcatgtccgcaaaacgtatcatctttttggggaatgtatagctggcatacaggttccttagcttgatgaatgaaccgtccctgtaccacagtgaattggcgcggtagttgttggcgttggtgagggtggtgaggcgtggcatggttgcttgggatgcattctccggtgtccatggagtttcgttattcaggaatgtctgtgagatatttccgttattcaccaatggttggtatagcggtgaattcagcaagctggtagtgacacccgtcattccctgaaaatcggcggaaatctcgaagttcttataagaagcggtgaggttgactccgaaataaaaccggggtacactcgagccgaacatctttactacgtcttgttcatctattctgttatctccattctggtctttgtacttgatgtcacccggacgtacggtagagaatgtctggacggggctgttgttaatctctacctggtcgtggaaaaagccgattgcttccagtccgtatctctgccctacccggtttcctttggtatacaaataatcatattgctggtattcctgtccgtcattgatgattttgctgttgacgtaggaggcattggcaccgatactgtaattaaaatctttgcctattttgtcgttccatgagacagaggcgtcaaagcctttgtagtcttggataccggcattcagtttgcttacaccgataccgatgatattggaaacagaaggtgacccattgataagaatattgcttcttctttcgtaaaatccttccagataaacggacaggcggtttttgaaagcgttcagttccattccataggtgactttttttgatttttcgattgtcagattctctacgggaaggttaccttctgccagcccgtaaaattcgctggcattgttggtgaagtaataggttccaccgttggcactaccgtatgactgacggtaaagttcgtgctgcatattgccatcccaaccggagattccgtatgaagcgtacagcttgaacaggttgattgcttcaacgcttttcatgaatttctcgttagaggcaatccatgcggcagatattgccgggtacaagtggaagtggtctccttcgggcaggaatgccgtaccggaatagttgagtactccgttgattgtgtaccggtcgttatacatataggtggcatacagtatgccggattgtctcttggctcccttgtttcgcccgttagctgtgtaggattgctggtcgtagataagcgaggcgttcaggtcgtgtacaccgctttgtagcagataattgattttagcctgaatgttggaacgcatataaagtgacctgaatttggagtcgccgtgattgagggtttccgaatcttttccgtagatgacgggagtagtcactaatgtgccgtcgggaagcatggaagcttgtgtgtccatatatttatattctttcgtagccgtgtcatacatagaaccggagttgtcgaacgctacggatacttctgccgaaagacctttcaacaatgcgtccagttcctgtttcaaggtggcgttggctagtagtgtgccgtaggtggtccggtagttaccggtactttccagcagggcaacagggttgttggctccatacgtactgttcccgccatacgtaccgtctgcgtggcggacagggaatactgcggaaggggtattatagatgattcccgcaagcaaattggtattgttggtaccaatactgtaagcgttattagtttcctgcaatttcccgagaataccgaccttgaaaaaagtgctcgaagtcaggtccacatcaatgttggtgcggatattcaggcgtacatccgaaggtttggtactatatctcccgtcggcttttttgtctttgaagagagccgtgtcgtgcatatagtcgataatggagtagtagcggaaacggttgcttccaccgtcgaaagtaagatttaagcgatgattatcggatattttgttatacacttcatcccaccagttcacgttcgggtattcgtagggataggtattgtttttgaatgcgtccagttcgttgggctgatagcgtgtattcagcccgtcaagtgccaatgccgtgttgaggctgttagcgtatgtgtaggcatcggcaaattctggtttacggaactggctactaataccgtactggtatttggcggttactttcagcttgtcatcgtgtccgcgtttagtagtgacgagtatgacgccatttccgcctctcaccccataaagggcggatgccacagcatctttcagaatttggatagattcgatttccgaattgctgatgtcggataaatcgcgtggaaagccgtctaccaatataagggggatatttccgtgaatacttaacgagggaacgttttcggcactggagccatttccttgatatacatttaatccggctattttgccgtacaatgctttggcgatatctatttcgggtgctttgtcgagcactttgctgttgacgcttctggtggagccggcaattgctttttggggcatttccgtctgatatcccaattgcaccatgtccggcaaactgtctcttttctgttcctgtgcgaatgcaggaatagtgaaaccaccgattaatgctatgattatatatttcttcataagatatgattaacttaagttattgtgtaaatttaccagccgggattttgggtcattccatatcccttgttgatttccttttgtgggataggtgccatataccatttgctgtcccaattgtttgcccagtaacgtaaagtcagttcgtaaggtgcgaaagtaaaggaagtggggttattgaccttgtctcctttggaatacagaccatatagcttttttcggaaatcgtctttgcgtccccagcgtacaaggtcgaaccaacgcacttcctcgaagccgaattccaatgcccgttcgcgcaggatagcttcccgcaagtcagactgtccgatgtcggaaggcaaatcggagagtcctacacggttgcgtacttggttgacatagctaagggcattttcgggaccttccacttcattgatagcttctgcatagctcaacagtacttccggcagacgtaaatagggccattggacagggcggttttggcgatcgcttgcagcttgaaggatgaacttcatcattaagaatccgctaccttcggcacgataatcctgatggttggtatatacaggggcttgcgtatcattgaaataacggtcaccgggaacagctacattttcatataatcgcgggtcgcgggtaggctctccgttctcgaaaaaaggctgtttggaaggatgctcccaattaaaattctccggaaaatcttctccgtccgcccaagggaacatatttacatagttcagcgtgggaccggagtagaaacgttgatcgaacaaattgttgtgggtgctctcgttatatccccgtcggatagaaaccaatacctctgtcccgcctctgtcatagtatccggcacgataggcaaggcggcgtgcctgcgcggtcggttctgctggttgtgtcagggcgtattcttgccttctatctagttcggcaaagaattcctgtccggctttcatcgcatcttcccaacgtttcttgctgtaattgccatagcaggtatattcatccgcctgactatgccatttggtgtcggagttgaaagtaggactggctgcaaacagtaatatcctgagttttaatcccatggctccggctttagtcatgcgtccgtcttcaatttcatcctgtttccatttcaggtaggggattgcttcgttcaacaggccgacaatcttgtctgccgtttcggcaaaggtgagacggggaaattccattgtttcgttcggttctattgaatggtcaatccaacatacaccgcctacatagcggaacatttcagcataactcaaggcaataatcattttggcttcggcaatccgttcgttgcgctcgtcttctgtcatatcaggcacttttgctacattctcaatatatatccatgcataacggattgcgttgtactggctttccgaaccataacggtaggcttcggcatttgctaatgagttgttggcactcaacaggccgttgtaatagaggttggtaggaccgtcggatgcgttgtttctgaaactctgatataaatcgctgattgcctcgagcaggtttactcccagtttattattgggtgctgcccccgtaggcaacccataaggcagataggtatatgcgcttgtcaacactttgtctgcattgattttggagctgaacatggaatccagtactgcgcctgaactttcgggttggcttcccagaaatttgtctccgaatgtcaggtctgaacaggagcagacaccgtaaaccaggcagattgaaagtaattttataatattcttcattgttgtacggtatttagaagttaagattgacacctacactataaactttaaccaatggataggcacctacattgtttcctaaactttccggatctaagatgtcgaggggtgagaaagtcaacagattatatccattgagggaaagtccgaggcttttggcgccgattgcttttaggaaacgtttgttggtaaaggtgtatccgattgttagggttttcaggcggatatacgaggcatctttcagccagagggtagagttctccgagttccatgtttccgaagtttctgctgcacgcggatatttagctccgagttggttttcttccgtccacccttgtttgtagaagtagtccaacagacctcgtttacctgcattggtaaaaggaatacggtattctacttgaagcattttattgacgtgcgttgcaccgctccattgcatgctgaagttgaaccccttgtaactgaatccgccattgaaaccgaatacatattccggtcgttccgaataaccggttgtcatccggtcatctccgtctactatattgtcgccattcaggtcggcgtacatggcgtcacccggatataccttgaccgaaggttggggaagtgaagggttaagtaccagttcgccgtttgcgtctttcgtgaagtcgctgtactggtagagccggagatatttatacacattagtcggacgttccgtagaaccgctggtctggttcatgtagtcatatttgttgggcacttcgtccatatagatgattttgttgcgggcgaaagacatattggcgttagcataataatggataccgttgttcaatgtatggtcccaacccaatgaaatttcatatccatgattatccacttttccgatattcaagtttggtagtccggtggcgatgatagaaggggtggaatttggtgatataaggattccggtacgtttttccttgaagtaatcgacactcaatgaaagtctgttgttcaacattttcaggtctataccgtaattctgtttgtcggctgtctcccagctgacgtcggtgtttcccggagttccgagtatatatgcctgactgcctgtcggattggaaaccccgaaactgtacgtaccgttttgtgtccatactcccggcatatacataaagcgggtgctcgaaccggtatcgctacctacgcgtccccaggatattctccatttcaggtaatcaatcaaagattgttttttcataaatgcctcttccgacatgatccagcctacggaagcggacgggaataaaccgtaccggtttttacccggagcaaagttctcggaaccgttgtatccagcattaacgtctattaggtatttggatttgtatccgtaagtggcgcgtcctacaaaacctacatatcctcgtggcatatattggtaagtggcgtctgttccatccgattttttcggatagtaattacgtgactggttgtaaagaaacaatgcggtgactttatggtccttgttgaatgtacggtcataattgattctgccttcgatataccagttgcggtccctgccgtaatcttcggaataattgagtggagtgatacttccgttcggcacatagacaatggttttatcataatccgggtcggtctgcggtttggtagagtcatccataaatgatttgtagtaagcagtttgcgattcgactgtaccgcctgtacgatacttgttcagcctgaacatattatcataagaagctttgactgaaacggaaagccccttggtcaatatatccagtttttgtgtgatgtctacatctgtgttcagggtggtcttgtattcctggttgtaaccttgtccccaatatatgctcaatccgtcacggcttactcctactggagttaatgcgcccggagtcatagtccgtactccgtttactatgccgggaccggcaaaaggaagtgcccatatctgggtatatacccaggggttgtcgctggaagctctcggctcctgcttttgtcctacgttgccgccgatgttcagtttcatggtggttgtccgggtcagcttgaagtcgagattggcacggtaattataacggttgtacttgaagttattgtcatagggcagcgcgtcaaattgtttcaagataccgttctgataaagataacttaaagatacgaagtattttaccgcctcattgccaccggatatgttgatgttgtttttagattgtatgaataagtcgttatacatataatctccccatttagtattggggtacataatggggtccgaaccagtgcggtatgcttctatcgcttcacgggtgaagtacatggctttgtccgtcacccggtcattttgttgcttcatgttccagtaacgggcgaactcgtagcttccggtttgctggacgtatgatagcggttgctgcacaccggtaatggtgctgacattgatagtcggcttgccggattttccccttcgggtagtgacaagaactacgccgtttgcgccgcgtactccaaataccgccgtagcggaagcgtctttcaggatagagaggttctcaatttcattcgggtctatctgtgagaattcacgttctacgccgtctaccaaaatgaggggagaggaagcaccaccggttagcgaaccgctaccgcgtacaaagatagaggcggcatcatcacccggctgtccgcttgtctgcacagtggaaactcccggcattgctcctgctaacacattgctgatacttgctacgggggcttttagcaattcctttgtgtcgatagatgataaagcaccggtcaatgttgcttttgtctgtgtaccgtaggcaactactacgacttcatccagtgattgtgaatcatctttcagagtaacgttgacagttctatttttgcctactgcaatttcctgtttctgataaccgatgaatgagaataccaatatggctttctcgtccggtactacaattgtgtattcgccattgatgtcggttatggcaccgatagaagtgcctttaaccagcacatttgcaccgataacttccatttgtgtattatcgactatcttacctgtgatttttatgccgttctgtgcaactgcgggcatagaactacaaaaaacaaagataaatgacaatacaaagaaacgaagccatcctgctcgaattttgctttttcttttcatgtgattgatttttgtgtgattaatatagttttagttaaaagggtgctttttgcggacaggcggcattatgctgcctgtccgggttgtgttaagtgaaaaacctctttatataattattgaaaactgacgattcctgactgttacgaatcgtttttttattgtttcttcgggagataggcagcgaacggatcgttggtctgcatcagccattctctgagttgcttgtgcagggcgcggactaatttaggtcgttctgttgctatatttttcatttcgtacgggtctttgtcccggtcgaaaagtacagtccggtcaatctttccattggtggcgtgtacggcaaaagtatatcttgaagtacgcagaccccggtagccggtagttggattatcgggttgtacgcgatagtaaggctgcacggttttcttgtccgcttttcctgacaggatagagttggcaaagtcgaatgtctgtacttcctgcggaatgtctttggagaatcccatcatggataataaggtgggatacatatctccgaacgcaatcatggtatggttgtcgacccgtggcttgatttgttgaggccatgaaataatcatgggaactttcatggactcttcgtagtaaatgtcttttcctgcgtagtggtgggctcccatgcatattccatgatcggaagtgaacactacaattgtattgtcgaatagtttcagccgtttcaattcttcgataaggcgtcctacgttttcgtctactccggtcatgcaagcatagtagtcacggatattgttgcggaagtagtctcccatttcagttcccttggccggaatgtccgggcgattcttgcataaagattccacattcaggtgcttataaatctctttatatttgtcgggcacgaggtcataacctgtatgcgggggattcatggatacgaccaatgcgaaaggagaactgctctttttctgttccgagaggaactcaatggcacggtctacctcatattcaggtccccatttatgggcatagaagaaactgtcgcgcggagcggctgtttcccaatacatcggattgaggtgattgtcatacgtgccgtaagctacccagaagtcgaaaccatgtcggcgttcggggggacaccattcattccatgccgtttctccgcggttgttgtaggtatccacatagggtttgtagggtgagtcgagatgccatttcccgatgtagcctgtccggtagttcttgtctttcaggacatcactccagcaacgggctgtttccggcagttccacaccatagggggctgtatccgaattgcagtttcctattaccttattattcatggggtacataccggacatcaagattccccgtgccggtgatgaaacaggatagcaactgactgcattggtgaagagcactccttcggacgcaagctggtctaagtggggagtttgtaccggttctttgtccaggcagcctaaagcgtctcctctccattggtcggccatgataaaaacgagattgggggattcgtttttatcttgtgcctgaacaggcagactggctgctatcggcagtaacaaaaaggtgttttttaaatgttgtttcatactatttatttggattatttctgttgttctcaggttaatgatttactgttccggtaactgttacaaaattaaggtgaaggcaaaaaaacgcctctgagcatttcattcattaatgtctggcgtttcattcaaatgacgattaattgggcttttttctagctttttcgagttagtttttgtttctttgtgcgcagagttaaatctaatcccgcctatgaacgcaaagaaaattttcttattaaccgcctgtttgttacttccttttttgcttaatgcttctttggagcagaactttaaaaagatgaatatgcaaaacggtcttgccggtaattccgtttattccatatttaaggataaggacggatttatatggttcggaacaggagacgggttgagccgttatgacggaaagaatatacgcagcttcacttccgataagtataatatgactattgagcatatgtatgatacatcggacgggctgcttctttttatcaccagtaataatttgcactgctttgaccgttaccgggaatgttttgtagaaacagccagtttcagagatatgcgatactataatacgagagggctggtactcctgaatgattctatctactggtcgatttcgaaaaataagttacacttattgaagcgtgtgcttggtagaagtgctgataataaaacttctttgctttcgcttgaagtgctcaaagaatttgtactgaccgatgaagcggagattatctatacattttgtgaatcgcaggacaagaagaaacttttcctggtaacggagaaaagtaaactgcttattttcgatttgcagacggagaagttggacgctgttgttactctgtttaccagccggcccgattcatatcagatttcctcattggtctgtgataaggattatttgtggatgtcgacgataggcgggggcgtgttgcgttatcatttacgcaatcattctttagattctttcacaagaaattccagtagtaaacagtatttgtcgcatgatgacgtgtatgctttgatagccgtgggagataaatatatagcggctacctggaatggatatacggtactttccctggataggaagaatggtggtgtaacgaccgagattaataaccagctttcccgtttttcctataacctggaatctcgtatgctctctgcctattatgattctcaagggttgctctatttcggaacacatgggggaggggtaatgattctcgacttgagggaaaagttttatgaaaggttctgccagagtgagacgagtgaaatctgtgatattgtgtccgatgataaagggaatatctggatggctacgtttcatggggagatattatgcagcgactcgccgtttgacccgtcaaagcctttgagtttttctccgaagaatactcccattgttgaaggaaaagctgtgctttgtgctatgaaagatgaggaaggcaatctatggtttggcaattcggatgcatccataacttgctatcaatcttcttctggtaagtttatgaactataacttgccttatgaataccggaagaataataatctgaaatattctacttatgtgtggcagttgtttatggacagcaagtaccgcttttgggtagggacgcggaacggtttattactgttcgaccgggagacgaagaacttctctccggttttaacggtggagggcaaaccattggagaaacattctatacgtgccattgtcgagggattgaatggggaactttggataggtactcccgatggattgtacaagttagtattgaatgtcgaaggaaaagcggaaataaaaggaaattatgaagtggcagtgggaactgccgcccggtatgtccgtgctttgcatgcttctacggacgggcaactttatatcggttatacggagggactggggattcttgcgcaaaataaggactcgatacaacatttctataccacccgtgacggaatgtgcagtaattttgtcacttgcataacggaagatgagaacgggcatatatggctaggcacgaattcgggtatctcccgatatagtaggcatcagaatttattctataattactatatctcgggcagtaaccgttcggttttgcaagcagcaaatacattgttcttcgggaataactacgcattgacttattttaatccggaaacggtggaaatgataccttcgataaagaaaaacctcttgcttgacctggaagtgaataataagcatgtagcgattggtgagaagagaaacgggcaggttatattgcaaaaaggacttccttatactgatgagcttactctggcttatgccaaccgtgacttttcgctttcattcagcaacttgctatattcggaagaacatcagaagtataattatcgtttgctcccttatcagaatgaatgggtggtatgcaacggaggagaaaaagctgcttataccaatctgcctgccggtgattatgtgtttgaggtgaaaagcgtttatcccgacggcactgacagcgtggtaaatacattagcgatacgtattcttcctcactggagccagactatctggtttcgcctgtgtgtgcttttggttatattgttgataaccggctatgccgttcaccgtgttcgccgtgaacagcgaagggctaaacgcgaattactcctgaaacatgaattgcatatatccaatatggagcgtgagcaggaaaaacagattcgggaagagagggagaacttctttacctgtgtggctcatgagttgcggactccgttgacattggtactttctccgttacaggaactgttacatcgaaagacaaatgctgaccctgattataaggctttgtcgctgatgtatgaaaatggtaattcacttcaccgcttggtagacgacttgttgagtgtgcaaaagattgaggcggggatgatgaaattatgtctttccgaagtgaatgtcgtggctctattgaaagaaacggcgaatactttccggcaaatggcggtgtcgcgaaagattgatttcgttcttgatttgccagataaatctattcctctatgggtggatattgagaaagtcgcttctgctgtacgcaatttattgtcgaacgcatttaaatatacggaagcgggaggtaacatcactcttgctgtaatggagaatacaatggatgaaaaggattattgccggattgtagtttccgatacgggcagagggattccggttgaattgcaacatcgggtattcgactcgtttgttaccggaggggcggccccttccttttcgactaaagtcggtattggcttgcgtattgtgaagaacacgatggatatgcatcacgggacagtagacttacaaagcgaattgggaaagggaagtagctttagcttgaatttcccgaaaggaaaagcccattttgccgacgataactgtgaagaaacggtctatgaaccgacgacggatgacaacgcaagtccgacggatgaacctgtcgtaccggaacaggtaaataaagaagagctatctgctgcaaggtataaaacaactttgctggttgtagaagataacccagatatacggcagtatattgtgagtcttttccagaataaatataatgttctggaggctgccgacggtgaagaaggggtgcagcaggctatgcgacatttgccggatttgataatctccgatattatgatgccaataaaagacggttttgcctgttgcaaggaaatcagggagcaggtggagacagcacatatccctattttaatgttgacggcaaaagcggaagatgcggatataatacggggagcgcagcttggagtggatgattatatgatgaaaccctttaatccggaaatactgaaagctaaagtcgaaaatctgattctgcgcagggaacatttgaaacgaatttatacaaaatcgttgatgttgaagcaaacggcgcaggaaacagagggggatgatttcatgcaaaaagtaattaatgtcatagaagccaatctggctaatgaggattttagtgtgcaaatgcttgccgaacggttgaatatgtcgcaaccaactttatacaggaaaattaaggaacgaagtgagctttctattattaaagtgattcgtagtataaggatgagtaaggcggcttcgcttatcatggagcataaatactctgttttggaaatatctgaaatggtcgggtttaacgaccctaatacatttcgtaagcatttcatagagcaatttggtgtgcttccttctaagtatgatgaacggagtaagggagaagagattgatgaacaacagagacagtaacgatacatttattatataaatagaaaatgctcattccgtattgtgtggaatgagcatttttcattttgctatgatttatctttttgctgactttagaaccggaaactcaccccccctaggaaattgaatccttcggcaggataacctaaatagtattgatacttcttgttcagcagattgtgtacttgcgcatagaccgatactcctttgaacatattatagcttgccccaatgtgcaaatcattgatagcagccatttttgcgtatccttccacttcttccctgttgatgtagtcatagccgagattgatattcaaggcggaaatcggatgaatacgaacgttgaaagacatttcgccggcaggttttacagccaacagatattcttctgttttgctgtcccatttacgataagtgtacttggcagataaagacacgatttctttatagtcgtagctaacttcacctccgacataaagattgtctgtattatcttgcgagaaattcagataagattcgaaatgggtaacactcgctcttccgaaagctgaataagataagtcatttttcaagttctggtagcctccgtatatattgaaccatactcccggataaggactggccttgaatccgagcgtaccattaatttgttcgtatgtatcgtaaggacgttgcacatatccccaagtggaagaaagatgggcgtccggcagttcgccataaggacaaatactctccaatctgcggaaatcattgagaagtttccctcctgttgctttggcataaactacatagctgtcagagaatatgtattgtgcagtgatgtccggtgatacgcggaatgttttgtcgaatccgaaagataagtccacattggcgccgacgtgtaatttccagtcatcattatccagttcgtaataaggattcagaaggagggttgtataattcttgaagtattcatctccagtggagatattctttgtatatccgctgtataagaaattgttcatagctaatgcaatagtaaccgattgctggtcgttgatcgctcctgtgacatctcctttggtacgtatgattgtttctttaagcgatgtattgtctgtatgttcattgagcatattgtgctgacgttcgtacatcaacagattcgtctcggcattgaaacgcaggggagcggtttcatcgatgaaatgaatgccggcatgaaaatctccggatgtaaacttttgcttgctgttcgcacttcccggtttgaagttaaaattactcagtccgaagttaccggcaatattcaaatccagcttgttaaactggtgtgtataatctacgttggcacgtgtacggtaatagaatgcattccatttctcgctgtcggtgaaaggaatggtcagtttaccgtccattccatccatttggaagcgtacattcagtttgtctttatcagacaagcggaataaataattggcgagtacatcgagattgccgtaattgccataaccggcacgcacatatccgggagtgctgccgggttgtgtttcttttccggtataggggcgcatcagacctgctggaacggaggtcgccggaaagaatgtcgtggcgtattccacatttttcttgctgactgtcggttcttccactttgggcaggacgttcactttcgaggcgtccataatatccggattatattcttgttccacaacgacagtacggttcatggtcgtatctttgggttgggtagtctgggcttgaagagctgacggtattgagattgccagtgtaagtcctcctattatataaaaagctcgtttcatatcatttctgttttttagattctcaattttcagttttcagtttctgaagtctgctttcaatcatactctcaatatcgtcgttaccttgatagttctgttgcaggctcaataggtattggcgtgcgtccagatctttgcctgtcgcatgataaacatcggatagaaggacaaagctgcgtgccagccagtaagcgtgaggggtactctgttcgatgtagttgagaagttctttttccgcagcagcatattctttggcatcgtaaagcccttgggcaacctgatatttcgcttcggcaccgtaagggttacgtgtgtccttagccaattcgcgataatcgtccattgctttcttgccagctttttggttagtataagctttggcacggtaatagagcgcttcgtttcttagttccggactaagcttgggctctaccagtaaatcggtagcggcatggattgtttccacatcgtctctcaacaggaaggcacaacgcaggatacctgtttcggcaagctggcgtctttctacattggttgctttctctttcagcattttgtaacttgccagtgcctctgccgtattttgttggttaaactgtacttccgcccgcaggataagtgcttcttccgcaaatggattattcggatattccaataacttgccggagtggaggagaatcatatcataattcttctgttcactgccgatcagacagagatagtaatgtgcattcagactgaaagctccttcggggaaagtctgcaggtatttgttgaggcttgttttggcttcttccattctgcctttcatataaatcttttcggcagcggtatacgtaagcgaatcctgttcgttggcgtcgaaacggatatgtcccggcatggcattcgctaaagcggcaaactcatcaatgcggttcaagtctacataaatagacttcaagtcacgcatggcgaggcgtgcttcttcgctgcccggatatttctcgataacttgcttatatgcttcgatcgcttggttataatctcctttctgataaaacagcaaaccgatttctgcggcagcttttcggctgaccgggctttcgggatatttgttcagcagttccttgaaggaggtgatagcctgattgttgttatccattagcacataggaacgccctttctcataaatggcgtttacagcataaggtgaagcgggatatttgccgaccagacggttcaataaagtgattttaccggtgtagtccttctgtaagccggatacgagagcgagttgatagaaagaataatctcctgaaggagtattcatttgctcggcttgcgaatagtaatgtttggcttcttcaaagttacgtacatggaggtggcagtcaccaatacggttgtaagcgtcggcaagcgccgttgtgttttctcctttttccaattggatatatttttggaaatagttgcttgcctgtgtatagtctttccgatggaaagcgatatagcccaagttgtaattagccaacgcgtacatttcgttattgggctgggtggtcagttgcaggtaggcgttgaaatcgcgggctgcctctaccattcggttgagacgataatatgactctccacaccagtagtaagcgtctgctttggtctggcggttgtattgtccgatagcgatagactggttcaggtatttaagagcctgttcgaagtcggcgttggcaaaagattgtgtacctaactggaataatatcttttgtttggcttccagtatctgggcactcggtttggcaatccggtcgatagattttaatgcggcatcgtagctgcgggtattcatataaacttctaccaggtaactgcttactttttcggcgtatggagaggtcggaaattcattcaggaacttctcgaaagcagtgacagactcgccgaaggcagaaaaagaagtttcgtgcaggcaaagcgcatagttataagctgcctgttctttgatttgcatattggcattggatgcagcagcctgttcgaaagccatacgcgctttgttcttttctgccaattgcaggtaggaaagtcccatgtgcagataagcgttctgtgtaagggcatcgttttctgtggttactttgcctaacgtctctgctgctttggaataaacttttgtttgatagtaagaaagtcccagcatataaagggcatcacggcgcgggacggcgtgctctctgtccagataattgctgaatgcttctacggcttggggatattgcccgaagtggtagtaggcatctcctaggatgcggtacatttcggcggcgtgctcgttattcgggtaagccgacaggtaattctgtgctacgatttgtgccttatcataattcttgagctgtacataaatctcggcgatataataagggacgagtgccttgtatttagcattgtcttgtagcggcaggaaacctttcaatgcttcgttatagcgtttctgtgtgtaacggatataagaaatatagtaatcacagtctgttgcatacttgggactgttggcacgtaaggtttcgaaccagatagcagcttcccgcaaatcgtttgttttcagataacaggtagccagttgataagtgcggtcgtcccgttcctcattgtttagcaaatcgaggtcggtagagttgaagagtgccatagcctcatcgtattttccttcgtagaagtagcaggaagccagtaacgagtagatacgattggcataaggagtatcgggataatggtcgagatacttgcggagcaattcgatacggttcttgtcgttcaactcgtaagctgaactgaccaacatatactccgcatcttggagtaggctggctgttggcttttgctttacaaatgcctttagtgccggcagggcagcggcataatttttttcctggaaaagttctttcccttctttatagaggttgtcagctgaagtgaatttatcacctgtctgggcaaatcctataattggtgcgcaacagatagccgcacaaatgagtctagtaatttcttttttcataatagggtgtttatgcaaaagtactatatatcttccaataacgtattttaatggctgttaatttaaagctcattaaaatattagacagaatggaaggggatatgtttccgtaatttgttatattttaacgaattatctgtcggataagaattttttaagtcctcgacggatagaatccagtccaaaatcttccggattgatctcggagagaggcaggaagaaagaatctgatacatcatccattgccgagaagtggcttatatcttctacggtacaaagaaagaacatatcaagtgtgtgcacgggaaaaccggaatagatgtaaatattgggaagtgagaattgatagacggcttgttgcactttcaatccggtttcctccaatacttcacgggctacgccttcttcgccggtttcgttcatgtcgataaatcccccgggaaggtcgagcgtacctttggcaggttctttggcacggcggcagacgagcagctcgttttggtcgttcaggattagagccacggtagcggaagatggattgaaataatagacaaagccgcaatctgtacattttttggacttttcattgttgacttcgaaatgagaggaaccacattcgggacaatattggaacaggtcaagaggatgtttcataattcttttgcagatactgcattttggttttttcgattacaaaagtacctaaaaaagcaaaaacgacaaactttgtgagtgtatcgtttttgcctgccttttctttttccctcaaagaagacgttcctttgaattattttacttggaaattttctaaactttctccaacgaaagatgctttatttgaattagtaaccaacattgtactgtgtattttattatatccgtattgtttgttccatacatctttgttagctaattgtatactgtattcccaacgtgccgaaatggttggtctggggtcgggaagattcaaataaatatcatattcaccgcttggcattgattccggtagtccgaatcgagcctgaatgttaatctgctcattcggaaaccagaaacgcggatcttctttaagtttgatcttatacttgttctctttcttctttttgtggacaaatacaatctcgacatctctcggattaaatggggcagcccaacctgtattctgtaactttaacaccacttcataaggacaacctatttctcctttgggagtaaaatatccttcggagagagtgaagcgataacctaaacgcttttgtatttccttcatgcattgttcgtcctcccattggttgatgactgcgggatgataatcaatattaatatacgaccaatggtatttggcaaagtctgttacagcattctcgcagttcgaatattccgacagtttacaggtttctcctcccatggctacatattttgtttcccattcccagaattttctgtaatcaggattctctccgaaagttcccatgtcatctatgtcggccagaaaacagtcgttgtgaaaagctatacgagataagtcggattcattataagccgttttcctggtaatggtgtcggtgtagttaatattgaaagtaaataacttggctaccggataccgtacacttatcattctgtccttgggcattactttcagaagggcatccagtaccttacggcggggagcatactctccctttttaggctggtagttataatggtcggtataataccattctccccataccccgacaaatccggcttcgagtacacatatcacatccgaaaattcttccagaataggttttagttgttggatatgctgttccgtgagttcccagggagcatcccatggcttctcgttttcggacgaagtatatgcaaagcgtaatacggattttgctcctccttttctgagagccagcatattgttgcgtatccgttgcagatattcttcggagatcaacttatctttgaaatctctcatatagtaggcggtgaatataaggctcatgcctttctcccgacattctttcaagaaggcgggggtaatggagtggttattgtccgtggcatattcctgatgagtgaagaatcctctctccgggttacaaattatttcctccgagggttggtatgttactttctccagttgatccggcgtactggaagcgggagattctgtttcttctttggagtttactttgtcattgcagaaagtcaataacagagccggaatacaaaaaagagataagaagagtcttttcatgggatactatatatgaagtgtgaatattcgggattatttaacttctacaaaccagggaagccgtgaaagagggacatcgagggtatacgttttacctcctttatagacttttcccagatcatctttccatttacctttggggagttttactgtacgtgtattgccgctggacataatgggggctaccaggtatttatcccccaacatatactggtccctgcattcttcaaatccctgattagggaaggcataatccatgtgacgtacaatgggttctcctgtaatagaggcattttttgcctgtgagagtatataatcacccagttgctcatgccatttggcatacttgatgcacgtttccaggttctctttatttagaatccgccagggggctaccgaaaactgcatcatcggcatcatggaatgtatctggcaggaacgtacaatcaatgtctggtcaaaaccggacgcatcaataccctgaaaactggaatattctccgcctccaatcatgtcgggacaggcatacgaatatcccaacagaccggcggctatcattgagggtaccagacttgccactccgtcccatgagtatttcttgtcgcccaggcgttgcactaaaggctggccgcctaatttccaacaggcgcggaattcgttatatggaaattcgagccccaacttggcccataaataagtctgttcggtatcatacgattggcggtcgaaaacatctacctctttttccggatatctttccgggtctcctgcatcgaatttgaaaccgtcgatatgatagtcttgttgcattttcttgagcgtactccgtaaatggttataagcgtcgggattgctcaggtcatagcaggcactggaaccgttccaccaatcgagaattgccggctggtcactaccttttctttttaccagatatccctttgtctttagatacctgaattcttcgctatcgggtgacacaaacggacttacccataacatcactttaaatcccatggcatgaagttcgtcaaccattgctttggggttcggaaacttgtccgggcggaagttgaagtttccgtaatctttttgccagttatcgtcaatcatcagtatgccggtaggaaatccgttgtcgataatacttcttgcatatttcaggatatcctcttgattctgattatatataagctctatccaggtattgtattgcggttttgagaagaacagttcgggcggcaatataccggtgggtgggaggtactttccggaagcggccaggtaagcctcttttaatgtgtttcccgcggtagcgtgctctattgttcctctggcggattctatgcggattttgccgtctctcagttgaaaccggaatggaccgtcacaccagatataacgccccttattcgagataagtaacggggtagtctggttattaaaattctgggtttgcaggtcggcttctgttgtgttatcgcagaaaggcattttattgccgaggtcggtagctcctccccaccatttttcattgggaaggatttctatttcttttacctgttgtggcaaagcagttgtagcgagactgaatgccaggatactgaggattaatttcttcataatataaatattaatgtgactaatgcttgataaattcggagggtgaactgccgaattgctctttaaatgttctcgtgaaataagacggactttcgattccgacggcataaccgacttcactgattgacatatcggtggttcttaacaattctgctgccttgtccaaccgaatcttacggatgtaatttcccaaagacattccggttgtcgacttgataaagctatacagtttggtcctgttcattccaagttcgaggcagaggtggtcgacggagaattgctggtcggttagattggcattgaccaattccactagtttgccgaacacttctctttgtttcttgtcctgaatctcctgccggacgttgttggcagtaggcagattcctcatctgatgacttttattgagaagattgcggacgtttgctttgagaagtctggggttgaagggtttggggatgtatgcatccgctcccatttcaatcccttcaatctggtcctcaacctgcgattttgcagtaagcagaatgataggaataaaacaagtctgtaagttcttctttagagttgcacacagttctatgccgttcattctgggcatcattacgtctgaaatgataatgtccgggaggctgcggttacatttgtccaaggcttcctgtccatcaatagccatgatgatattatagtcttttacgaaatactcccttaatatcataagtatttcgtggttgtcgtccaccagcagaatcgtaggtttgccttccatataaatagctgtggtctcttctatctccaatggttcgtactctactgcatagtttgataaatagtcttttagtacgaaagtactttcttctatcttttcctctttggccagataggtgtccgatatcggcagggctatgataacttcggttcctgcatctggcttgctgctgatgataattccgccgtggtggagttcgataagagatttgaccaaagataacccgatgcccgaaccggtatgctgtttacctgtattattttgcacctgatgaaaacgtttgaaaatggtaggcagtacggctttctccatgccaatccctgtatcgctcactcttattatcgcctgttcgccgggaatcatatctttggtattccagaaagaatccttatagcggggaacaatgtcattcacgtatcctttagcaacctgaatgttgatttcgctgccggcatgagaatagcgtatactgttggaaaggatattcgacagtattttaccgaaatgctccgggtctatccacatcccgatctccggattgtcaatttgtaagttcacatggatgtcggaggcttccgcccagcctttgaattcttcgtaaatatcgctcacgtattcaggaatagaagtataggtcgtcctgagttgggcggacttcacttctgcccggtgaaaatcaagcagttcgttgaccatgttcgacagtttgcctgtattatgctttatgatatttacatatttgtttgtgcaaatgtcctcgtcttcagcaatctcattgatagcgtggcttatcaaggtcagcggggtccggaactcatgagaaacatccgtgaagaatctcattttcatttgcatcatttcctctttctgtcgttcctgttctttctgcatggaaatcgtattcttcatctgagtccacttgatgaagtaacggaaacctacgtagaacagtcccagaatggcgagaatatatagggtataagcccaccaagtcatccagaaagggggttgggagtaaatctgcaatgcatattgttcattactccatatttgccagtcgcctgcttccaccagtaaggtatgcgaaccgaacggaattttctgataagctacggctggttccttgcctgcttctatatatcgccattcattatcatatccttccagtttgtagcggtagcgtatgtggtgctggttactgtaagataatgaggtgaagttgacggagaaattattatcaggatacttgagttcaagactgttggaaaattcgatgtccgagtctacaggttttccgttgatatggcaaccggtaaagtaaacacgatatgaggtgttatgcggagtttcggcaataggagtgaagtagttcaggccgtgggctcctccgaagtataagtttccttcgtcatccttggcggaagaggaagtaccgaacacataactttgtaagccatcgtttgtgtcaaatacattgaagcgttttatcccgtcgtcgaagtagttcagattaaagcctccgcaccatacacgcccgaacttgtcgacttcgatactctctatgtcgttggacgtcgctccggcttctatcccgtaactttcggctgagtagtcataaatcccgttgggcctgtctatcagtgtcactttgttaagcccgttgcccatggtgcctatccagtaagtagagtcacttcccttgtcgataggccagatgtagttactgcttaaactgttctcgtcgttttctctcgccagatatttgacgatacggactaccttgccttcattatcgaatatgacacggttgatacccattgccgatgtgataatgagttcatttttagttgtgtcgctatatatgttgtgaagcaagtcggtggacagattacagggagcgggtgtccggctggtataggtcatcgtgtttttccatagaccgttgatctcttcgaaacactccagtccggcatacgtcgtgacccacaaacggttgaacttgtcgaaatccagccagaaaatataaccgccgttgattgtccgcagtgagtgggtaacttctcttgtttttttattgataatgacgatattatctctgacagctgcatagatattcctgctatccgactgtatacttgtgatactcggaaataactggggaaggtgacaataatcccatatcacctcttttgttctgatatcgaaactgctcaatccgccaaacttgcttcccatatatacatggccatccttgctgtaatgtacggaactgataaattcggaaccgatacttgtatcggacgttctgaaaggactgtatctgactgttttgaaaaaacgggcccttgtattggcataagacacgcctgcggtccaggcggatacccatagattattgtccctgtcgaggaagatattgttgatgtcacttcctaccgaatagggattggacggtgagtgcttatgttccatgacagaggtggactcattgcttttccatacttggaaaagcccttcgtttgctcctatccatacatattcggggtcaacacataaggacagtaccccgcccggagtatggaacatgacctgcttggcaagtgtataactgccgtcgttttcgattttatatttagccagatgttcctggtagatgatccataaatctccgttatcataacaaatatccctgactcccgaacctatgttattattgatattgccggaaaacttcagttctccctcagcgtcaaccttgtaggcggacagatacctttttcctgaaatccaggcatttcccaagctgtctgttgccaccttcgggttcaactcgtcggaaatataattgtaagcgtctcctatctttctggcagaaatgaccggttccccgttatctttttcggaagattcaacctttaccaatctgatttggttatccgatatgagccataactgattaccaatgccctgcttgagcatcctgactttggaataaaaggcgggatcgggttgagcctctgtccggtaactgacaaattgcttggttctgatatcaaaacaagccagtccggcttccgtagccagccagatatagcggcctactatctgaatactataaactctgttataatagactgaatttataataccgttttcgtacttgtaggaatcaatggaatatccgtcgtatcgattaagccctctatggcttccgaaccacatatatcctaaggagtcttgtacgatacaggtcacgttatcgtgtagcagtccctcgtttctggtcagatgacggaacaggagttcttcctgtgcattgccggttatgaatgcacaggaaagaacgataagtgacagaatgatttgtttataatatctcataagcaaaaaacgtctgtgttatggacgaacggttatgtcaatggtagagaactgagtgttgtaatcatattcactcgcatgaatattgtttcctacattgtctttatacccgctatccgaatagtttttcatacttgtattggtgcctattacgactacctgataattacctggttgcgtatacgtatattgatatttcaatattccggagttgtcattgatgttcagagactggcctgtggagaacggaatatagtctatatcaccataacttgcggaagctatgtagtaatcgcctaaatatccggcattattactaggagtaaataagatctgtatgtatgacaatgtacccatagtttttcccgtagctccctgccaggcgtctataacactcgacaaatcaacggagtagtctgtaaacgcggtattgggattccagtatatgtcccagacggtttcatctctgaatataacctccgtttcaccgactccgatgccgccgaggcggatgactacctgaaaggttgttatgtccggacgctgttctcccgaactgacatctcccaggatgtctttgtcgaatctcatccgtaaattcagctttttgtttgttcccagcttggcgtccgtatgcaggcggagtgcttgataccaccattcgggatgaacggatgtgattttcagtacattctgctgaatggactcgtcatactcgatttcggcttccgaacctatcaggttatcgccactgcctgcgttcacaacttctgcgagattgtctgtaatggaagtggaaccggcgggtgtatcggcaaagttacaattatacggtgtaatttccggatcgatagggcgataattgttgttttgtaaatcatcgttggtttttcctagcagtagatagtaggcactgctcttgtagtcgtgcccgtcatctccggtgtaaatggatacggccattgcattatgccggatactgaatgtaacgggttctcctacctttacctctgtcttgtctgcactggcggagatatgtaagctgggggcttcctcttcattgcacgcaataaatgtagttgctgcgagcagaagtatgaatttagtataggttgttttcattctcttatcgttttaagttgacacaaaagattaatatcccgggttctgagtcaggttcttgttcacatctatttcactcaaaggcacgggcaataacatattgcgggattggatattctccggagctccgggagttgtgatttcccgttccgtattactgatgaacgggttgtattgccgccatgcctgcatctgctttaccaggatgccacggcggacgaggtcgcaccacctgtcagtcgactcggctactagttcgcgtgcccgttcgttaagtatttcagttctgaaggctgtataatcatcgccgtatctgttatactcccaggcagttctcactccgtcgtagatataaccgtatgctccgggtttccagtcgggtacacattcgtctacttcggtagcatagtcggtaattaatttacggggcagtacatcctggtgcataatgccttcgttggcgattcgcgaacgtttgcgcacaaggttgacagcgtcgtaagcagactgtatggagattccgctcatgtccattcctgaagaaggtcggtagtcgccgggaccgtggttgacttcgttgtatgcttccgcgtacatcagtaatacgtccgcatagcggagcagaggttcatccataccgaagttggtgtaattgtatgatgaagggtctgccaacggatatcgtctgaatttgccgatactccattgaagccagttattgttttccgtggcctcgctcagcttctggtcgccccttgtgtcccaatacatcttgtagtcccagccccataacgttccgtcatcttgtatggtcattcgcgggcagttccataaacggcggatagagtcgctcggttcatacatcatgcggtggtagtccgaacttgagatgttatcccacgaacctccgagattttggttgcctctgataccgaacatcatgcctgtccatgttcccgtatcgtcacctgtcaatccctgaacacaccacaaaacttcatccggtgccttgtcccgggtcttggcattgaatacatccggataatagtccaccagtttgtaacgtccgccctgaataacagcacttgaatgttcaagtgacttctcgaaattgtcggctgcattgcctagtatttctttcccgtcccgttgtgctacgctacccagccataaatatactttagccagaaaaccatggcaggcgtctttggtcaatctgccgtattgatagccttttgaagtgtcacccttatccattgtgtgactgatacagtattcgaaatcctctatgatttgccggaacacttctttctgcggagtgcgtgtcacctccagtccgtcaagagatttggtatcggtcaataccagcggcacatcaccaaaccacctgacaaggtcgaaatacaggaaagcacggatgccatgtgcctgtccgacatatctttcccagttgttgattttctctttgttggtagtcacgttgtctatcacagaattgcagtcttttatcactgcatagtgattttgccacataccggcgatatatgtgttctcagaaccgtatgtaaagttactcagtccgcttgcttcgtcccagcttgcgcgtttcagcaagtcgttggggatttgctttatattgtatcccgtcacccacgaatcggataatctgcggtaaacaccattaatggcttgccgcgcatcggattcactgttgtagaaattgtcagttgtcagcttgcctttggggtcttcttccagaaaatcggagcagccacaaatgttcaggcatacaagcattgcaattaatatgttaaacttattcatgtccttgttcttttatgattaaaaccctagttcgattgaaagcgagaaggagcgtggtctcgggtacgggctcatgtcgagtccgggagccagacgggctactgttccgtaaccagtatttgcctcggggtcgaagccggagtaacgggtccagagccataagttcgttccggtcagtgctatgcgcattttggagagtcccattttgccggttaacttggcggggaaggtatagcccagggtcagggtttgcagacgtaagaatgaaccgtcttctaccagatcacttctaagtacgctttctccccaggttcctcggccgtacaaaggataattattagtgggggtgttggcagaccatacatctttgtagacactcttcaagacgttgttgatactagtcgttcctacgagatagtaggcgttgccgtttactacgtcgttgccgtatgaccagcggaagaaggcatacaagtcgaaacctttataagagaatgtattcccgattcctcctgtatgtttggggttgacatccgcaatcggtgtacggtcgttcgagtcgataacaccgtctttattgacatcgacaactttgagttgtcccaatccgaggttagggccggggtatccgttgatgacttcggtatcattgttgtaagttccgtcgctgatatagccgtaatagatacctaccggcattcctactctgagcaggacatcactggtaattttggcattaatccctctgtcgtagaattgctggtattgtcccttgtccagtgacaggattttgttcttgtagaaggagatattgaagtccgtcgaccaattgaaagcgcctttaaaccagttcgcgttaatggcgaactccatacccttgttctccattgaacctgcattcttccaggctttggtatagccggaagtagaaggaatgtttacttgcagtaacatatcgtcaatccttttgtagtaaaagtctgccgtaatagagaaacggttatccaatacgccgaaatcaaatccgatgttgtactgtttctggctttcccatttcaggtcgtcattcgttacgttggagggataacgcccgatttccaccgtgcttccgtgcattaccaccttattgttttccaactgggataaagattgataagagggaatctgattattacccgtcataccgaagctggtgcgtaccctcaggttggatatgaaatcaaacttcttgatgaattcttcttcagaagcgcgccatgcgacactgacagcagggaaatagccgtatttgttattggctccgaacttggaggagccgtcgacacgcaaagaggcatttaatacatatttattgtcgaaagtataggttcccctactgataaacgataccatttgattgctgtcatacgtgtatttgggagcgtaagtgaccagccccttgtctattccccatataccgacggccatgtcttcgaagtttgttgatttgttgtagacatctttcatcgaccatttgctggcctcaaaagctcccattagtgagaaagaatgcttctttatgcttttcgcatattgcagccgtgcttcatatacccaactgttttcttcccggttgctgatttccatgcgtcccctttccgattgcccgtaccaggtatccgaaccccagagcttgtcctgatccatggaatactggcgataagaggcgctggtactgaacgtgaggtctttcaatatcttatagttgaagtagatattaccattgagctcactataccgattgttgatattgacctgatcgactgctaccagagggctcattatgttcacgttactgtaattcatgatatctgccagtcccggataaaacaggaaaggagaaatctgcaaggcattgagaatgactcccgactgtgaccagtcgctgaccggattcttgtctttagaggtagagtaagacagattaataccgatatcgatttgggaattgacctcctgattcaagttcaggcgtgaggtgaaacggtcgaatgcagaccgtttgataattcccgtattattcagatatccgagtgagagcatataggttgttcctttggttcctccggatatacttgcgtttgcttcgtattttttcgctgtccgggtaatttcatccatccaattgtgtacggacgggttgttccaacctttgttgtcaatcacgttttgccagaaattgatgaggttcggactatcgtatgttccgtaatcaagcatcttctttgcgtactcttccggagataatacttccaacggaatatttggattcatatccagacctcctgtcagactgaacgagaatttaggtttggtagaggctgctccccgtttggtggtgatgatgacaacgccattggctcctttggcaccataaatagctgccgccgctgcgtctttcagaatctccatggattcgatgtcgttcgggttcaatcctaacaatggattattcaccgtttcggaatcttcattggtgatctgttgagtaggcatggggacaccgtcgatgacaaacagaggttgggttccgcctgtgatagagttgacacctctgattctgaaggtcattccgctcgataacgaaccgtctgtcgggataatctgcacaccgctgattttgccttgtagtgcttgcagggtttgcgccgaactgcttttggcaatatcttttatattaactgacgcaacagcggttgcaatgtcgctttttctctggctaccgtagcctacgactactacctcgtccatttctgttactgacggatccagcgttatattaaacttgcggttcttgccgatagctactgtcttgggtttatatcccagataactgatgacaatcttttcggaaggaagtgcttttagagtgaactttccttctaaatctgtaattacggcgttggtagtgccttcgatatttaccgtagcaccgatcagaggttcgctcttctcatccaacacttgccctgaaatagttacttgctgtgctaatactaccgtcatgtggagcattaggaacaatgtgcttaatagtacctttctcttcatagtgcagatattaaagtttataataagaatgaatacaaatagacttaaatggtgatgcaaataaagcgatttataatattcgggctttgacttatagtacttttctcttgaccaaattacaaacttctcttttaaattatctccgtacgccttaaaattaggggagagtactgcttatttataaatagtccggaaaaagaccggatatgaaggattgtatattcaatcattctattttctgaaatatacggctcggcgtaggcctgaagggaaaaactcgaaggatttagcattagtgagtttgcgaatgttatcatattgggctattccctgttaatgtgtcactcttttgctgattagtggtgtgtgtggaagaagatattaatgatcctgtttgaaaatgataatatcagttgcttcttgcccttatgccaactagaataaatagtgcttcaaataggtgtctaaaatccttctttatcgtgtccagattgtttcgcaccttgaaacattttgtatctcaccgggaaacaagtcgggaaacggttgtttcttgcatatttgtcttgtttatatgcataaaaaggctggatatagtatatatatgcgttgctttatgcacgatttcttctcttagtgagaatttgacagtcccggttgtgatgggaatcttaaaaataggacttttagcggacttatcggtttcatctatcgccgcatagaattattcgattggactttttttgcaagggcgggtcttccgcctttatctttgcatcagaaacaagaaacaaaacgaagtttctgatgttataagtcaaatcaattaataacaataaaagtaataaagattatggaaccaattttaaattctcagcttcctgaattcagtgttcaggcttttcaaaacggagctttcaagactgtaaccaacaatgaactgaaaggtaaatgggcgattctgttcttctatcctgccgactttactttcgtatgtcctactgaattggtggatatggctgaaaagtacgaccagttcaaagcaatgggcgtagaaatctactcggtaagtactgactcgcacttcgtacataaagcttggcatgatgcttctgaaagtatccgtaagattcaatatccgatgttggcagacccgacaggtgctctgtgccgtgcactcggagtatatatcgaagaagaaggtatggcataccgtggtacattcgttgtcaatccggaaggaaagattaaagtggtggaattgaatgataacaatattggccgtgatgcgagcgaattgcttcgtaaggtggaagctgctcagtttgtagcgactcacgacggagaagtttgtccggccaagtggaagaagggtgaatctaccctgaaaccgagcatcgacctggtaggtaagatttgatagatcttgataatgatgattatgaagggccggtaacgggagacgctgccggcctttcttttcaaaaaaatagaaggagaaaaaggtatatgttagaatctgcattaaaagaacaactgaagggtatttttgccggactggaggcgaattttacttttgatatatcggtatcatccagtcatgaaaacagaactgaactggttgaactgctaggagacgtagcagactgctccgaccacatcacttgtgtagtgaatgaaggaagcagactgaaatttgctttattgaagaacggtgaccgtactggaatcactttccggggaatccccaacgggcacgagtttacttcgttattgttggctatactgaatttggacggcaaagggaagaacttccccgatgaggctgtctgcaatcgggtgaaagcactgaaaggcccgatacatctggttacctacgtttcgctgacttgtacgaactgccctgatgttgtacaggctttgaatgcgatgacaacactcaattcttccattacgcatgaaatggtggatggtgcgctctaccaggacgaagtagatgcattgaagatacagggagtgccttccgtgtttgctgacggcaaattgctccatgtaggccgtggcgaattcggcgagctgcttgcaaaattggaagaacaatatggaattgatgaaaccaaagcggtggctgaggtgaaagaatatgatgtgattgttgccggtggaggccctgcgggagtgtcggctgctatctattctgcccgtaaaggattgcgtgtagctattgtagccgaacgtgtcggtgggcaagtgaaagagactgtcggcatcgaaaacctaatctctgttcctgaaacaacgggcagcgaactggcagataacctgaaaactcacttgctgcgttatccggtcgatctgttggaacatcgtaagatagagaaagtggaaatactgggaaagcagaaactggtgacgacttctgtcggtgaaaagtttctggctcctgcattgattattgcgaccggtgcaagctggcgtaggctgaacgttccgggagaagcggagtatatcggtcgcggtgttgctttctgtcctcactgtgacggcccgttctacaaaggaaagcacgtagcggtagttggcggaggaaattccggaatcgaggcggctatcgacttggcaggtatttgttctaaagtaactgtctttgaatttatggatgaactgaaagcggataatgtacttcaggaacgccttaaaacattaccgaacgtagaagtatttgtcagctcacaaactaccgaggtggtaggaaacggcgacaaactgactgctttgcgtatcaaagaccgcaaaacggaagaagaacgtctggtggaacttgacggagtgtttgtacaaatcggtctttctgccaatagtagcgcattccgcgaagtggtggaaaccaatcgtccgggtgaaattgtgattgacgcacattgtcgcaccaacgtgaccggaatctatgcagccggagatgtttccaccgtgccttataagcaaatcattatctctatgggagaaggggcgaaagctgcactttccgcctttgatgacagagtacgcggcgttatttgatagaaccggaactaaaaataaaagctacaaaggtatcgttcatgcctttgtagcttttatttttttattacctttgaggctcatttaattaacccccaatgagaaacatgaaaaagaatcttttattcatttttgccgctctatttattttttcggcacaagctcagaatacgttgaaactgatgagctacaatatcaagaatgcaaacggtatggataatgtatgtaatttccagcgtatagcgaatgttataaacaatacatccccggatgtggtggctatacaggaagttgacagcatgacaaaccgaagcgggcagaagtatgtgttgggcgaaattgccgaacgtactcaaatgcatggttattttgcacctgcaatagactatgacggaggaaaatatgggatcggactgttgacgaaacaagtcccgcttcgtttgcagaccttacctttgccgggaagggaagaagcgcgtacattgattctggcggaatttgccgattatatctattgctgcactcacatgtcgctgaccgaagaagaccgtatgaaatcattagagctggtgaaggctttcacttcctcctctaccaagcctctctttctggccggtgacatgaatgctgaaccggaatccggctttatcaaaaaactgcaaaaggattttcagatactctctaatccgaaacagcatacattccctgcgcctgatcctaaagagacgatagattacattgctacgctaaagcagaatgcgaaaggatttgctgtgatatctgcaaaagtcataaatgaaccgatggcttccgatcatcgtcctatattggtggaactccgtactgccgaaaaggcggataagatattccgcatgaaaccttacttgcagaatccggtaggcaacggtattacagtgatgtgggaaaccaccgttcctgcttattgctgggtggaatatggaacggacactacccaactgaaacgtgcacgtacgattgtcgacggacaggtggtttgcaataactacttgcacaaaatacgtatagacggcctgcaacccggtcagaaatattattaccgtgtatgctcacaagaaattctgctttatcaggcgtataaaaaggtgttcggcaatacggcgcagtcggccttcagtgagtttacacttccggcaacggatacagactcttttactgccgttgtctttaatgacctgcatcagcatacgcaaaccttccgagctttgtgtcagcaaatcaagaatgtcaattatgacttcgttgtcttcaatggtgactgtgtagacgacccggtggaccataatcaagcaaccagttttatcagtgaactgacagaaggagtgtgtggcgaccgtataccgactttctttatgcgtggcaaccatgaaatccgcaatgcctattctatcggtttgcgcgaccactacgactacgtaggggacaggacttacggctctttcaattggggggatacccgtatcgttatgctggactgtggggaagacaaaccggatgaccattgggtgtattacggtttgaatgattttacccagttacgtaatgaacaagttgatttcctgaaaaaggagttgtcttccaaagaattcaagaaagccgggaaacgtgtccttattcatcatattcctctttatggaaatgacggaaagaacctttgtgcaaatctgtggaccaaactattggagaaagcacctttcaatatcagtctgaatgcacatactcataaatatgcttatcatccgaaaggtgagctgggcaacaattatccggttattatcggtggcgggtataaaatggatggcgctacggtgatgattctggaaaagaaaaaagacgaactgagagtgaaagttctgaacgcaaaaggaaagattttactggatattaccgtctgaaacgattgggaataaaataaaggcaggctgtctcgatataaagaggcagcctgctttgttgagtaaccgtaaaatgttacttctctatatgaataatacctgtatatcctcctcctctgctcatatctatgggcagtttttcgttgtccttgataacttgttctattatttgggagtctttcgcctgttgcccggcatttactccatctatatgtgcttttattttcttcggtccatttcctatgaatgataaatcaatctcaatatgccgtggggtagctccgttgattactccgatataccatgtatcgttatgccggcgtgcaagagcgatatattcgcccacttctccctccaaagggactgtctcatcccaggttgtaggaatacttttgataaattcaaaactccggagattcttgtcatatttagtaggactgtccgaaatcatttgcaacgggctttcgtagactacatacatggctaactggtggctacgtgtgccctgactcatcggttcatgttgattttcatagaatgtttccggatgtgcgttaagcatagctccgggagtatagtccattgggcctacccacatacgcagataagggatgattacatcatgtgtaaccgtggctcttttgctccatttgttatactccagtcctattactccttcgcgtgtcatcagattcgggtatttgcgtctcatgccctcgttggggtaagaaccgtgaaagtctactaataatttgtattgagtggctttaatagctacttgttcgtagaagttaaccattttggcatcattacggtccataaagtctattttgactcccttcactccccatttgctgaattgtgcaaaagcctcatccatttgtcgcatgatgtttacccatttcgaccataactggatacctactcctttttttgttgcatattcacagataagcggaatgtcaacatcgggattgagggttaacagatcgttacgtgccgaccagccttcgtcgatcaggacatattcgatgtgatgtttggctgcatagtctaccagatagagatatgtatcggtattaatgccacttttgaaatttatatgatagatattacggtcattccaccagtcccataatactttaccgggtttaacccatgtatagtcggcggcttgttctttctcctcggagagtaaatatataagctcgctttgtaatatggaagaagcattgtcgaagataccggtcacccgccatggaaagacccgtttcccgcaggtgggaataagatagtctttgcgtgtggaggcatagattttattatccccttcgtatggcacttccttgtccggataattggcaaaaatgccatggaaggattctagggcgggttgtaagtacattcccggataattatagagattggcttctgctaataatactttgtatttgtctacttcgaccattacaggcgctacagagaaactgtctttgggtaatgcattgatcggctttaccgtataatcctgctcaaaccagttttgtagctggtcggttaaaagagtgtacgaggtatgatcctgtccgaagcggaaagataccgactctttctttacaggctgtttattgtttgcagtacttacgaaacgataggccactccgtcattatagattctgaattcgattttatagtctttgtaaataagctcaacctggttataattatccactgtctctttatatttacgcggtacaataaattccactttttccgaaacgcttttacgagttatctttctacatttgtctgttccccaagtgtcgtttccgactgtaagtgagagcgggcaagtatcaagaatctttgttccattccgggataagctgtaactgacctgattgtcagtctcgatagttatcacatttttcttgtccggcgaaccggcctcaattattttggcaactgttatcgaaggaaaacagaaggctgctgttagtaggaaaagaatatggttcattttcataattagtttcctccggataaaacgatgaatgataatcctgtgatgaacagaataaacatgattcctaaaagtctgtcggttgatttggaactaccggtgaactctttccagataaatacaccccataaggcggcaatcataggtgctccctgaccgagagcgtaggagatggcagctcccgcttttcctgcggctatatagcttaaagcagttcccaatccccatatacatcctccgaggatacctaccagatgtgtgcttgcttttcctgcaaaatattctttatagcttacaggagttcctacaaacgggcgtttcataacaactgtattgaataggaagttgctcaggaagataccgattgagaatataaagaaagcggtgtatggagtagccatgcccggagtcggagagtcaaaattgttaaggtccatggcagcagccacaaaacggtagaagaaagacataagtatgccggcaatagccgcaagaataatccctttcttgctattattatttccctttttttgttgtctgcctgccgctattccattgcagatgatagcgataacaatcaagattactccagtaaacaaccagaacggatctcctttaggagtgctgaaatagttgatgaacacacctaggaccaaggcaagtcctacgcccaacggaaaagcaaccgccattccggctatggagaccgaagctgaaagtaagatgttggaagcattgaaaataattcctccgatcaaggcactgactatgtatctggtatctacttgccggatatcttccagaaaacctctccccgaatctccgaaacttccgagtgtgaaaacgagaagtaaggcaaataataagataccgattgtataatcccagtaataaagctcataacgccagttcttactggccagtttttgggtgttaccccaggaaccccaacatatcatggttatgaagcaaaagataatggctagtgtataactattgactataaacatgactctttctttattggtttatattcttttcttctttccctgtcacctggcggacaatggcacctaatgttctctgaatattctcatttccttgaatcataagatattgatgttgtcctttgtctgacgcattaaatagactgtgtcctgcactgtctattgtaatcgttccttttgttgacagttcaaaataatccttctccggctctatggcctgtatgacagaagtcaaatcccaagtttgcctgtcgtatggcattttgtcatatatctggtaagatacacaaagaggatgtttgtaagcgttcgggaaatcattcaagatactctgatgcggatacaacaatttgttgcctagttcccagccgcttgcaatgaccggagtgggccattcgctgaatacggtttgtgcggcatttatatcctgtactagattccattcggggaagtcgaactcgttcccatagagtcctcccattacggacaacagcttcactttttgggcaacgagtgatttgccgtccaaaggactgtattcgtcggcttctgagcgtagcaggcgtgaaaggttcgtttctggtcctacggcaataaataccacggaattatctggttgtgaagccagtaatttccgtaataacttatatccttccggcagattgtcttttatgcttctttgaggatacagtatcttattgccttcaataatggtatccaaagtctggcggagataacctccgtcttcgggagtagctccgttgtatgcatatcccaatggaatgtctcccctctcgttgaggcggcaatatccgtcaatatattcaattgaataagggttggacttgctgattgtgatacctagcagatctattgttccggcgttctcatagttgaatagcatttgcatagccagcacgtcgtcaatgtcattgccgacatccgtgtcgaatatcacgggaacaggaatcttcgtttctgtaggcttgttacaggcgctcaagaagcagaacgaaaggattgcaacagatgtgatatatttatatattttcatgttactgattatttatcgggttgtttgaattgatattttaaagacttgtcactttgaatgtcgaagaataaatctggattcagacgggtatcggcaactgattcaccaataccgatatagcccattggatgataaccgccttcgaaataattctcattggcaaatcggagcgaaggttgcataccggccggatcgagcaccgttaaagccaggatatattttcccttggcaatgggggcgtcaatagaaatattctttcggatgtgataagttggcggagctatttggtatttatgttcatctacagaccaattatctcccggcatccattcggagatgtttacttcctccaatatttttccccacactttttgatgactttcagggtctagtaaagctacttctaccggccagttataatagaatggagacgatccgctgttgacaactttgaaagaaatagggaattgtgctcccaccttaatttctttcgggtaagagaattcattgataatgaaccggtaccccatggctttttgcagtatctctgcatttttccggaactccggttcgttgaagtctgcccaggtgattccgcctagatgattgcagtgcaggttccggatctgttccatgacatattcccgggtatccttatctgccaccacttcttcaaaagatttgaaccgggctaaatctccccagttccaagtaatttctccacctatcggctgggttttccaacgatcacccagcttcttcatttcctcataacctcttacaatctcttgaggttgagaccatgaatcccaataaattccgaattcataatctttaaattcataggcgtagcgaaccattactttcttgtttttgaatgctttggcaaaggcatctcccaggatcttttccatgcccggaatccatgtccggttagctacgtgttccggttcgtcgtgcggagcccagtaagttgagagatccggatcatggtgttctccccattcgccgatgatccccatttctacatacgctacccgtggatcgttatcccatgcctgtccgagtttctctaccagtttttttacgcgctcaggaaaagaaggatcaaagtaccccccgctaataggggtatttttgtctttttcttctacataggcgcccacggagttcggtttctgtttataaggacctttttccggatctattcctttaggccagtgccaaccggtcaagtcgtccggattagtggggtctttaggttttccgccatgccagggctccagccatacaagaaaaacccggggaattaccttgacatttatgtcttccacgcctttccatcgatgattgctgtaagcgataatcttgtctaccccgtcattggcgtcatcctcgatcatattccactgcatatattcttttgtcagtgaaccgtaagggtagggatattcttccctgacccggtcgataccgggagcgaagaattccctgaagcctttcatcggattcctgaatgcattcggatactcctggtaagaaaccgtgacggtttgttcactacaagcagataacgttccgaatgccattaggagtaatatgtttctgatgcttgatttcattaagcttattggttattggattttatatttcagggttttatcctgcctcatgtcattaaaactgctgaccggtatctcaaaatagataggctcggtattgacgccgatatgtcccattgggtgacgtcctccttcaaagtagttctgaacggcgaatctcagtgaaggaagcataccggccggatctagcacagcaatagagatgatgtaatctcccgtatccagtttcttgtctaaagtcagttcttcttcaacatggttcggagtagccggttgggtataaactttggttgagttgttccagttatctcccggcatccattgggatatcttgggagtcttcagtgttttgctccatacaacttccttggtttgggaatttagcagggatatttctaccggccagtcataatagaagggtgacgagcctgtgttggttacgtcaaatgatattttgaacggctcatccggcttgatacttgttgggtaactgaaattggataaaacaaaacggtaccccattgtcttttgcaataattcagcgtttggctcaaaagacgggtcgttaaagttagcccaggtgatgcctcccaagtggttgcaatgcaaatcacgtatttgctggatgaccaggtctcttgtcttttcatctgccaccacttcttcaaaagatttgaatttatagaggcttccccagttccaggttatttctccacctatcggttgagttttccagcggtcgccgagctttttcatttcctcgtagccacgcaccttttcttcatcaatagcccatgaatcccaatagattccgaattcataatctttaaactcgtacgcatagcgaaccattactttcttgtttttgaaggcagcggtaaatgcatctcccaacaccttttcaatgcccggtaaccaggtacggttctctacatgattgggttggtcgtgaggagcccatactgtggtgatgtccgggtcatgatgttccccgaattcgccgataatccccatttccacatacgctacccgcggatcgttgtcccatgcttgtccagccttctctaccagttttttcactctttcctgaaaagtagggtggcaatagcctccaataataggagcgttaagatcgtcttcatcgtatgtctctcccggaatgtcgcttggccaatgccaaccgttcaggtcgtccgggttgtctgtatgagtgttcttggcatatcctccgtgccagggttccatccatacgatatagatacgtgggataaccttgacattgatatcttctactccctgccacctgtggttactgtaagctataatcttgtcgacaccgtcgctttcattgttttccagcatattccattgcatatattctttaatgatggagccgtaaggatacggatattcgtctcttaccttgtcatagcccgggccgaagaattcacgtaaacctttcatcggatttcgtatcgcataaagatattctgccggattgaccgtaactcttccgtctttgacttctatagttcctcccccttcgataggagggagtatgccatggtcttcttctttacatgaataaaagaagatactcatcaatagtcctgtgataaaaataaattttttcatgtgctaaatgatttatgttaatatccttcgttgttttctgtgatagcgtcattggcatcgacggctgcctgtggaattgggtatagaacatgataaggctggatggtgactccggcatggtctttcatatattcgcccagtttgccgaagcggattaaatcccagcggcgcaggtgttcacaacataattcatgtaatctttcttccagtacgacttcggcaaattgttctttatttagattatcggctgctgttatggaagtcagtcctgccctgcctcgtacttcatttaaggcatcatacttatcattacttgtgtcatcaatgctgttcagcgcttccgctttcatcaaaagcacgtctgcataacgaatcattgtaaaattcagattatcatcttcaatcacattacctgtttctgcgtcccagaatttgccggaagaaggaggtgtctgggtgacgcctgcatattctgtgatgaagaatgcttttttacgtttatcgttgttatcataagaatcgtataaatattgtgtcggaccaaatccgccccagccgccaaagttggtcggtccgcctacattacgaggtccccaataagaatgctggatacttccctccagtccccatgaaccggaatgcttgaattgaatttcaaatatattctcatattcctgattcttgtttttaggatcgaatatatcctttagattatcgtacaatttgaatttgccttcgagcatccggcagtattttaatgcttcttccggttttccccactgaaggtaaatgcgtgccagcaaagcttgggcagcgtatgaagtggctcttcctttatcttgggcattcggccaggaggtagggaggccgagagctgcttccatatcctgcgtaatcagtgtgtaaacttcgtcaaccgtagcgcgcggtctcatgatttcacttctgtcaatggatgattttgtccataagggaactccaccgtacattcttactaagtcgaaatagtagatcgctcttaaaaaacgagcttgcataatcatggaactatgaagatccgcactgactgcatccgaaggcatatcaataactgcattgcaacgtttgataccttcgtaacagagccgatagtgattgtccaggaattcgtgtgaagcggaaaaagtatagtaatgcaattgggaataagccgcccaacccatatcaaacggaattacttcatctgttccgaattcagtaagggtaatggtatatttcccgacaaagacttcctggagcgtgccataagcggcataaagagtttgctgccagtcttccggtttttcataagcattttccggtgttagtacactttggggtgtcaagtcaagaaagttgtcgcaactacataatgtcaggcaactgaaagctaatattgataaatattttttcataatgtttctgtttttagaagttaagagaaataccaccgataaagctacgggcgttcggataaggattggtattgtcgctggactctacatcaaatcccgtaaattccgtagctgtgaataggttttgtacagagaaataaactctgatatttgaggctttgatatttctgatgacgtttttcggcaagctataaccaatttccagattacggaggcggagatagtcacctttttggagattggcatcggtaccatctccgttggcataagcactaccaactctcggagccggatatttgttgttcggtctgtcttgtctccaataatatttgtaatagttttcactcatgtttccccatacattgaaagaattgaggtaacggttcagtgaattgttgattttatgtcctcctgcaaaagtaaagaacgcggtaaggtcaatacctttatatgagaatgtattcgtaaagctaccataatatttgggagtggaaactccgcagaaatcacggtcttctccgttgatgacatagtctttcttggcatccagaatcttgcggtcaccgggttgggcattgtacttggcagcttcggcagcttcattggtttgccagataccttcggatttcaataagtagaactgtccgataggacgtcccacaaacaatgttttattgacatcttgtttgccgtcataaagttctttgatcttattgttattataagaaatcatgaaggcagttgtccataagaagtctttggtactgatgttgaccgtgttcagcgtaaattcaatacctttgttatcaattttgccgatattggtaagtgaagttccgaagccggattccaacggaaggggtacttcccatagcaggtcagtcgtacgcttatagtaggcctcgatcgtaccggctatccgattgttgaataacccgaagtcaatacccaagtctagttggttggctttttcccaagtcagttccgggttcgaaatagaggtttgtacggagccggttaccaggttattacctaaaatgtaattagcggaagctcctccgagggcgattgtcggggcataagcaaaatctccgatattctggttacccagtttgccggcgctgattcttaacttcaggttgctgatgaccggagcgttttctttgatgaaactttcttcagaagcacgccatgcaagagccagtgacggaaagaatccccatcggtgtcccggagcaaaacgggaagaaccgtcgccgcgcatcgtcaatgttgccaaatagcggttgctgaaattataattgaatcgtccgtagaaagacaccagagaagatgggactgcatacgaagagttcggtccatgttcttccgctccttgcaaattgtaatacttgagaatagatgataactttttggagtcggcggttacttcttcataatctgttctggaagcggagaaacctgccattgcagaaagttgatgttctttattgatgtcaaatgaataagtggcagtgttctctgtttgccaatatcttttcttgttcgacatcacattagcatggccaccagccgtataatgctgtcccatacggccgtcttcgtaagtatttactttataaaagacaagttctccgccgttatcggaacgtaatttcaagttctttatcggttctatctcgatgtaggcggaacctacgaatctggacttgagtgtagctttgtcaagcaggtcaacaatagccaccggatttgctctcgtgttgaggaaaccatcgaagtattctccgtcttcggtatagataggagctgtcggttgtgaactaatggcactgaacatagttccgtatcccgagtcggcttcttcattgatattcatgagctttgactcaatgacattgaaacgtacaccgtatctcagccacttgtttagtttggcatccatattatatcggacggtcagcttattgaaagacgagtttttgatcgtacctttctgatcataccagtctactcctaaaaagtgttgtatatcgttcttccctccggaaatcgagaagttatagttttggtattgcccgttttgggtcactgcgtcctgccagtcggtcgattcaccacggcttagcaagcgtagttcttctgatgtccatttgtagttaggctgggcaatggatactaattcatagtattgctgtgcgttcatcaaatcttgcttgttcaacattcgttgcgtaccgaaagaggcattcagggagattttggcttttccgcttgtacccttcttggtagtcacgagtactacgccattagaacctctcgagccatagatagatgcggaagaagcgtcttttaatatttcgatagattcaatatcaccggaagataaatcctgcaaacctccttgtacgggaataccgtcgacgatgtataacggctcgctgccggctcggagcgaacctactccacgaataacgacagaagcatctccacccggttttacggagccggtagtgacttgcacgccggcggcaagtccttgcagggcagttgtcactgttcctactttggagttagtaagattttctgatttgatagaggcaacggcacccgttaaatcgctctttttggcaataccatacccgattgccactacttcgtccagattaatggcgtctgctgccatttgtatattaatgacattttgctttcctacggtaacagattgttttaccatacccacgaaagtaaactccagaacatttcctctttgggccctgatgctgtagttgccgtttgcatcacttactgttcctgtttgagtaccttttatggttatagatacacctggcaatgtttcattactcgtgtcggtaacggttcctctaatgttgattgtctgtgcatgtaatacactggcaaaaaagatggctataaataatataatgtgttttttcatgacgcttattttataggattgttagttaataggcccggataggaagaacaccaattttccaaccgctttttgagcagatttcagaaacgatattagtctcttcgtagaagttcacataataggcagaccagccggcttccccgtcgccttcacttgaagtccagtaattgtttgccggaatattgactcctttctcagctaataaacttttaactttgaatacttcgatcagttcttctctggaagggaggaaccagtcggcatatacggcatttccttcagtgacactgttgttcagacaaagttgggcggcaattttgactccttgccactcgggccagttgttcgcactctgcaatgcattaaactttttgactatattttgagtgtttgtatagccgcttcccatgttttgactcgttccggccgcgtccgacggatttacctccggaccgaattgttctgttcccgtaccgatgttactcatgtttacgatatatccgtgtgcctttgcagcgtccacccagaatacaacacctcctccgagtttgtcgccaacattcgtttcgatagtgattgttccaagattacttttccgttctcccctgataatcataatagagtttaccccgtataatccttccggaagtgtaaattctactccttcttcattaagagttaatggcagattgtattcgacgcctgtcgggtagaaagaagcatataatacggcgacgtcccctgcttcaaatccttttccctgaatctcgactttgctcttgggctgtacattacctgaagggagaacgatatcaatgatcggaacaacgaaaggcactttgaaagttccgtttaaaacggtctgtttccctgctctttcaattgttacggtatactcgccgcctgcttctaccgggacgataaacttcaggtaactgtctgtaatctccgtgacttctaccttttctttctggttgtcagcgttacttaaatagactatatcttcttttgcaaaaccgagtccgttgatttgcgcaacctgaccggggatgatgtcattttccgaaggaaattttatttcctttagaatgggggctatgggagtagcggtgtgttcgtcgtcgctattacaactataaaagctgcatactatcaagcccgataaaatagggatgagtagtcgtttcaaataggttttcatggttcattaaatttaaaagttgaacgataaggctaattctttttcaagcatgaagtgcttcacttcatcgagagtgggaatagacggttgtgcacccgagcgtgtgactgcaatggctgccgcagtgttggcaaagttgagtgcttcccggtctatttctttttttgcacaaacgaccgccaatgcgccgcaaaaagtgtcacctgcggcgattgtgtcgatcgcatttactttacaaccgggaagttggatggtttctttagcatttttcatgtatgcaccttggcttcccagtgtgattaccacattgcttgtacccgctttcagcaatgtttcggctatttcctcaagattattatctgtataatctatccctgagatgaatgaagcttccagctcattgacgactagtatatcaatggctttcatcagctcctcatcgatcagacaggcgggtgcgggattgaacaatacctttttaccttttttctttgctgatagagctattttttttattgtttcgtaaggaatctcagcctgcatgacgatgatgtcggcttcgtcaattacttttgagaaatgggtgattgaaccgggtaataaagaatagttagctccgggagctactgcaatgcagttctcaccactgtcagccacaaaaataagtgcggttcctgtgggatgattgacatcatcaataatgtaatcggtggtgataccttctttcttaaagtgattttttaaaatatccgcatacatatcattccccaaagaggtgacaaacgtcacaaagccgccaagcctggctgccgccacagcctggttggctcctttgcctccgagggactgcatgaaatttgcatctccgactgtttcgccgggtgccgggagatggctgacttgtgcaaccatgtcgatgtttgaacttccaataactactactttcatttgaatcagatttatgtgatagacctaggctttttctttattctataagttgacttcccttttgtatggaatagcactctgggcaccgatgcgtgtgacggcaatggcggccgctgcatttgcgaattttacggattcggccaacgaatgtccttgggatagatacacactgaatgctccgcagaagacatctcctgctccggttgtgtcgatcgtctctacttcttttgcaggaatcatggtatattcgtccttttctttcacgtaggctccgtcttttcccaaagtaatgacaacattttctatacctttctctccgatagctttagctgcccggtgcgcactctcaacatccattacttttattcctgatagcatttctgcttctatacgattaggcaatatagtatgtacattatttaaaaaggagttgctcaacgtagaggcaggcgctggattgagtattactttcttaccgtatcggttggcaatagtagccgcgtactctactgtatctatcggaacttcaagctgcatgagtataatatcggcttccttgattttttcttccgctttattgatatcttctgttgaaagcgaacggctggcacccggtgctacaataatactgttttcaccaaacgaatcgacagaaataagagctactcctgacgggcttttctgatcggtgaatataaattcagtattgattttctcagatctgtatatttctaaagcttgcagcccgaatagatcgtaaccaattttggagataaaggtgacttccgctcccaaccgggccgctgcgattgcctgattggctccttttcctccggggttcatatagaaagttccacctagaatggtttctccggggacaggtagtctgttggctttcacaaccatatcggtattacagcttccgataactacgattttgggtcgattgctagatatagtttccataatattaataattaagatgatgcaaataaaaggaataataacgcgtcgttttttacattaatattccatttatataatttcaaattatatatttaggatgaaatatcctgtttaaaaataatttatggattgtattgttgtgcggaattatataattacaaacggataaagtgaaaataaggagagcgttttagtgttgtgagtttagatgatctgctttttctttttagatttctttagcatttgtgtgccgtttaagaacatcagacagtttttcttttcgtatttttgattctatccatgcggtaaaatcgaaaatgcgtaatagctgattttcgtatttattattgtataattcatgaatttcgggatataacttttcccagaaatcttcccggtcttttcttagaataggcagattacttttatttaagaaccataaaaccgtatgctctgttttgaaagtctgctctttgggagaagacaggctgcgggtaatagaacgggattcgtgtcgtatcaattcaaattcttgtgtctcatagtaagctataagacgaaccagacgaatggttctcattaatggcaggtatttgatattatgatctataatggcattactgatatatttttttgcggccttgtaattttggtttccgatgtgtatgagggtcgtgtaaagtaatagctcgcttttacgaatcggacttaaccatgcttctttatcataaagtgtttcctgataacggctcatgagttctgtacattcagcaaagttccctttgtcgaggtaaggaaatagctcatattggaaaagcaggcaagttgcatttaccttaaattccaatgaagaatcctctgcgattaactttcttaatttctccaggaaatagggtatctcattataatttccaaccgaccgcagactaccgagtactccttcaagtacagataaatagtaaatggggggattcgaccagaattgctgattctgttcaaataatgagttaagctctttgtatgaatttagggcagctcggtaatctcccgcccccattagatagtttgcttgaaagagtttatggtttcgtgtcaattcaaagtttccttccgcgtctgaagaagcggctatatatagctcgttgaccataaggtcgttcatatcttgtttttgcttcgcagttcgtatggagccgatatgagagaggcggtattttagtaaattgtgcagagaagattgctccgttatttttcggattttctttaaagattcattttggataaaatgtttatgaaaaagttcttgttctgtcatgttggggaaattcagccgtagcagatattccagttcctgtttttgggcaattgtcagtatctcattgttttcgtagaattgagcttgctcaattgtgttggatagaatctcgaaacattcttcgaacagagagcgctcatacaacatacgggctttgcatagatcattcagcagatcataatagatgtctttcttcttccttaatgtgagcagcgtgtctaccagtttctcatataaatattgaatggatacttcgaaggagcctctcggcctgcgcttataaaattcttctttcactgtatttccgttgggttgtttactcttcgtgataatgtcgtaaatcacaagatagtccttctcctccttgtctttaacgacctgcaaggagaagtgtttcttttctgattttgataaagagtatattagggagataacggaatcgactcttttcatgaaagtcctttcaattagtattagattgcaatattcgggaatttctgtgaaaaaagcaagttattcaagaaattaacacatccggtttaaacgagctcagaccggatgtgtctctaaatattaatgagttctttgcaacattaactatactctatcattcaaagaactttagttcttcgaatgataaacttcggttcttcgaataaaattatgcattcaaagttattaatatttttaggtaaaggtgttattttgtacatttaatgagaaaatattattttctttccatgtttttacgggaaaaactataccttcgaagcacatttatttaatattaaagaagaaatgttggatttaaaacagctcacaggcgatgtatgccgtatcgcaaccgaagccgggcattttttgaaagaagagcggaagaatttccgtcgtgagagtgtggtggagaaacatgcacacgattatgtgtcttatgtagataaagaatcggaggtacggatagttaaggctctttccgctttgttacccgaagctggctttataacggaggaaggctctgccacttatcaggatgaaccttattgctgggttattgatccgctggacggaacaacgaattatattcacgatgaggctccttactgtgtatgtattgctttgcgtagtcgcaccgaactgctcttgggtgttgtctatgaagtttgccgggacgaatgtttctgtgcatggagagggggaagggcctttatgaacggggaagaaatacacgtttcaggtgttcgggatataaaagatgcatttgtctttgctgagttgccatataatgcccaacaatacaaacagacagctctccacttgatagataaactttacggagtagtgggcggcattcgtatgaatggctctgccgctgccgcgatttgttatgttgctatggggcgttttgatgcgtgggcggaagcttttctcggaaaatgggattattcggcagcggctttgattgtgcaggaagccggtgggcgggttaccgatttttgcggtaacggacacttcatggacggccatcatattatagcgactaacggatatttgcattctgtatatcaacagcttattgcagaagtccctccattggatatgtgacgatattgtagccttcaattctctatgattatgaaacacacatttcttgttaaagaatggtttggggcttttctttccctcttattccctcgttgttgcgttgtctgcggcaggccattggcaaaaggggaagaatgtatttgtgctgtgtgcaatatggatttaccacgtaccgattatcatcttcgaagagataatccggttgagttactattctggggaaagtttcctttggaacgggctacgtcttttttctactatcggaaagggagtgattttcgacggatactacatttgcttaaatatggagggcagaaagagataggagccatcatggggcgatacatggctgcggaattgatagagtccggtttctttcagggaatcgatgtgataattccgattccgctgcatgagacgaaacaacgcatccgtggctataatcagagtgaatggatagcgcggggaattgctgccgtgactggaatccccgtcgatacggaagctgttgtacgtcggaaatatacggaaacgcaaacgcgtaaatctatttttgaacgttgggagaatgtggagggaatcttcgaattgcatcatgctgaatccttgattggaaaacacgtgctaatagtggatgatgtgttgacaacgggagcaactaccgtagcatgtgcttcccggatcatggaagtagagggtatacggataagtgtgctgacattagcggtagcagattaaatgtattctctttagtagtaccggataatcgaaaaaatagggggatattcctttggtggagtttgaggatgtttatcctgaagattgtatctacatatttggaagaaatgaaaaatgttatcttatattacttcgtaaacggatacgcttttcgatgctcttctattctataatgcagttttctctatttttacaaccagctattccgctattaataaacttgatttctgtttataataaacttttggatagtttattataaacggtatccgagtttattaaaaactatttttcccgtttttcgaaaatggattaaatattttaagtaaaaatataaacaaaataggacaataatcgttagactattgccctatatcatatctatcctgatactaaaatatatcagtcggaatgttgtttatgtatctatttttcttatatttatcatgctgtttatcacttttatttcttcaaagatacaaagaactcgcaaaaaaacggcaaaatttggataaataaagtaagtgtttggtattgaggagagttaagccaaattcttctatgcctttccaaatcgctaaaatgcaggataatgaaaggttaagagaaagatttgctacttatccgttgccttttttagccccggataatccggcaaaataacgcttgaccacctgcggttttaccgttcaccatgcaaagaaccctatattttgcccgtaaagataaccgtttttttccgtttttcatggaaatacaggttatgttaccggcatccggggttttattctttgttccgctataattttcataactgtaaataactctatatcaagtaattttgcaacataaaaaatagagttatgaaacagacggatgtaacggttacgttctacctcaaaaagagcgaaatgaatgacgagggacattgcccggtcatggcgaaacttgttgtcggcaaattttcagaagcggcttttagtgcgaaaatgtccgtacccgctgcactgtgggcatccggacgtgccacgggtaaaagtaacgccgcgcgggaaatcaaccggcaactggacgatttgcgagcttcagccatttccatttatgacgaactgtcagccacccgtgagaatgtaacggctgaagaaataaggaatctgttgttggggacggctttcgggcaggaaaccctgttgggttatttccggacgttcatcgaacatttcgaaaaacgtgtcggcgtgaaccgggaaaagggaacagcgcaatcttaccgctatgcttgtaactgtgtggctgctttcatccaggagaaatacaagttgtcggatgttcctttcacggccctgaaccgttcattcatcgacaactatgacctctacctacgcacggagcgccgctttgccctgggaactatcgtgttgcttgtcacacggttgaacacgattgtcggggaagccatcgcggaagggattatcactgccgacccgttcgcgggttatgaagccgaacatcccgagcgggaacagaaataccttaccgccgcagagttacaacggctgatgaccacacccctgcatgacccgaagctctaccatatccgcgacctgttcctcttctcctgctacacgggtatcccttacggggacatgtgccgcctgacgacggaggatctggaagtggccgaggacggtgaggtatggatcaagaccgcccgcaagaagacgaaaatcgactatgaagtgccgttgctcgacatcccgttactcatcctcgacaagtaccgggatatggccccggaagggaaactgctgccgatgtacagcaacaacgaactcaaccggacgctgaaacgtattgccgccatttgcgggattgaacggaagctcgtctttcactgcggacgccatacctacgccaccgagatcacgctttcgcatggtgtcccgcttgaaaccgtcagtaaaatgctggggcatagccgcatttccacgacgcagatttacgccaaagtgaccgatgacaagatcgacatggatacccggtctttagaggaaaagattgccggccgcttctccgtagctatttaatctatcattgacaatcaaattcacaacgattatggaaacgaataataaagagataaaacgtcgcagcacgttctccctgctgttctacatcaaccgcacgaaagtccgcaaggacggaacatgtaaattgttatgcaaggtaagcatcgacgccaagtcggccccgatcaatatcaacgcgtttgtcgatccatcgctctggaatccggaaaccaaaagggcgaacggacgaagcgagaacgcccgaacggtaaacctggcaatagagaaactgaccgaaaaaatcaccggacattaccgtcatattcgtaaaagcctcggtttcgtgacggccgagctggtcaaaaacgccgtggaaggaatcgggcagaaaccgttcaccctccttgccttgttccgcgagcataacgaggagttccgcaagcgtgtcggcgtggatcgcaaggaagaaacttatgaaagttacgagaactcctataatattttagcctccttcgtgaaaaaaaggaaggaaaaggaggatgtagcgttgcggagccttgaccgggaattctacgatgattttgaaatattcctgcgtacagatcgtgaaatgaaacccaagacagtacacgagcatctttaccggttgaagaaaatgaccaagcgggctgtcagtcagggtacactccggcgcgacccttacgggaagctgcacccggaactgccccggcgcaagagccgccatttgaaactcgaagacctcaaaaagctgatggaaactcccgtcgataaacccaacctccagcgggtgcgggactggtttctcttcgctaccttcacggggttgtcctacgccgacctgaaacgcttgtccgaaaaagacatcacgcagtcggacgacggaacgtactggatacacatccggcgccagaagaccgaaacgccctcggccatccgcctgctgaacgtgccgttgcagatcatcgagaaataccgccacgagcgtaaaagcgacaggattttcaacctctattgccgggggtatctcatcaagctcaccagagaactgggacggacatacggcttcgacatgacctttcacaaggcgaggcacaatttcgggacacatatcacgctctcgttgggtgtgcctatcgaaactgtcagccgcatgatgggacacaagagcatttccaccacgcagatttacgccaaagtgaccgaccgcaaggtggacgaggacatgaaacggctgaaagaacagaccaaaggccggaaaataaatctctacgaggaggacgaaccggaaacggcagatattataacggtaaacggttgaacagtataacaaaaattgataaatttgtatgactatgacgacaagagaacctatcagcattgaaaacgggcgggtggaaatccacgcgccggagaaccgtgtatggctcacgcgccaccagattgccgacctgttcggagtcttcgttcctgccgtggggagcaacatccgctccatactcaaaagcggcatactccgtgaggagagggtttaccgccgggagcgcaaccgtgacggcggtattgtcgagctgtattcgctcgaaatgatcgccgcgctggctttccgcttaaaatccgggaatgccgaagccttccgacggtggcttgtccgaagggccacgacgaccgccgtcgtctggcagctccccggcatgaacacgatattgaactgaaaaagaagaacggccaaaacgttggccgttcttcttttatacccattcctgtcccccgatacatttcttccgggaatcttccaggaatttctgtatctcggattccatgtatagtaccttgccctgaatcaaataatagggaatgatccgcgccgtgcggtattcctgcaatgtacgcctgctgattttcagcagccgggacaattcctcgtcggtgacgaaccgctctcccttgagtgtccggcctccggaggattccagtttatccagtgccttgccggccttttccaaacgccggaagagatccgccacacgcggatcgtgcttgtcgatgaaataatggctcataacgcggcggtattaggatagtgcgacgattgcagcagtttcccgacatcttccggtttgtagaagattttgtgacggatgcggctgaaaggcagcaaccctttctcccggtaggtttgcagggtacgtttcgatatacccagcacgtcacagacatcctggttgtccagccattttttcaaactcacgtcctcctgcctgcggcataacgcctcggcttttctttcaatggcttccacgtgccctgccagcgcgtcgaaagccttcacgtccatacttattatttccatgttctgtttcattttttgtttcccggatgcccaaaagtacacaaatggacagtatcttgttatcagccagtggcatatggacgtatccgtcttaaaagtggcagcgagtggcgccacgtccggcggaaacgatcctccgccgatacgggatcggcacgctccgatacgccaatcgcccgtgaaaggaaatgttcgcgggcgatttatcattccatgcagggtgagccgtgaaccgactttcgcgagcgttcacggcatatcgttttctccccgtttctctcccataaccttttcctctcttttttttcatgccgcggagcgcggtatggaaatctgttgtcagtagcaaaggtagttacggggctcacgctgctgcaagatcgggccgcggggcggtttgccgcaaaatcttcctctttccctgcgggcgagcgtattttccgacaaaatcttgcagcagctatccccgacaccttttgatgctaccgaaacagattccatccataccggctccgctacggcataaaaaaaaagtcaaaggttatgagaaacgaagagaaaaataaatggaaacagaaatcctccaaccttccacttggcataaaggcaaaggtcgggttggcggtaaaggtcggggcggtggctttgggcttccacgtgtggggtatcgactttatttgggtcgttttgggcttcacgttctgttatgacatcctgcggggcattttctcctgccttgtttctctcgtggctctaaccggctttttctatttcctattcactcacatcttctaaatttttacaggtatgacaaagtacatttcattattcggagcgactaccacggacacgcaggtgcaggtagtcaaggaaaaccaggtaatcatcggtatcggtgcgggtgcgagcagaaagcgttacgtcgtttacaaggtggaacacaccgcccgtggctacgtgtaccacatggtcgataccgaaacaaaggaaatcagccaaacggacattttgcgacccctctcgcaaacattcggtatcggcaggtactacgacgacgtgaaccccgagttcatggacgctttcgaggtggctttgctcgtgaggcaggcggaagagcaagccacggcgcaggccatcgccgccgccaaagagaaagccgagcatgaccgcatagcggaaataggagcgcagaggttacgccgcatcatgcccgaaggggtgcagggcgtaatcatcgccgaactcaacgaaacggaatacactgacccctcttacgagtgttcgaccacccgaagcgtgcgtaccgtcattctcggcttttcggccacctcccgcaacggcttcggggagttgagaaaggcggcggccaatttcccgcaaacggcgcacctctccgaatacgaccccaagaacgaacaccgctatcccgttttcacgctcggcaaaagtccgaaatacgggtggagtgtctgcaaactgacccactacacccgtgaagggtacatcgacaggctggcatatatcgcaggaaacgaggagaatatatgtctgcccgagccgaaagacgaaaaacgggcggaacgcactgaaacgagcgtgcaaggcgggtttatcatcgtggactattccgagaaggcgatagccgtattcggggacaccaagcccgtcaaggacgcccttcacgcattcgggggacgcttcaacgcacggctgacgcatgacgggcagaagaaagcgggatggattttccaaaagaccaaagaggacgaggtgcggcggcttctcggaaaggacgaataaatgttgaacacggggcggctcgccgccccacaataccaaaaaatcatggcacaaggaacagattatttcaaactgacgatacagaactatctcgacgcacgggcacgggaggacgaacttttcgcaccccgatacgccaacccgaaaaagaacattgacgattgctgcactttcatcatcaaccaagtacggcagagcggttgcaacgggtttgccgacgaggaaatatactctatggcactccactattacgacgaggaggacatcgacatcggcaaacccgtcagttgcaaggtagtggtcaatcacaccgttgaactgaccgaggaggaaaaagccgaggcacggcggaacgccatacggaaggccgagagcgaagcctacgccaagttggcgaaagccaagtccaaacccaagaaaatcgaagataacaaactaatgcccagtctattttagttatgaaaccgagaacaaaattccaacagagcgttgtggcggcaagcaaacacctgccgccgcttacccccgcacaaatcgaatgggggtacaagaactgcatcgagcatatcggacgccgcacgccgaaaggacttatcacctgcaccgagtgcggccacacgtggcagagcgaaaacggagaactcacggacaatctgttagggtgcgagtgtccgcactgccacaccacgctgaaagtggaaaccaccctgcgccgcaagttcaacgattacgagtatttgtgtatcgtaacccgctgcaagggttttcaagtactgcgcttcgtctatatcgagtgttgggcgaaagtgggacagacgcccgtttacacccatatcgaagccgtacagcggtggattgcccccgacggacgctccgcaaccttcgcacggctgcgcccgatgggcttcttcgttcacgggtggagttggtcgagcgcattggaactgcgggcggagaacgacgggaaatacaacatcacgcccacacgcatctatccccggcaacggcttatccccgaactgcgccgaagcggttacggcaaacaactccccgatgtaacccctttcgaccttatccacctgctgctctcggagaacaaggccgaaacgctgcttaaagcgggacaaacggcactcgtgcgatttttcgcccgttcctcccgcaatatcgcagactattggccggccatccgtatcgccatccgtaacgggtacgctatcgggaaaccgacggaatggtgcgactacatcgacctgctgcgatttttcgggaaagacctgcataacgcccatttcgtgtgtcccgcagacctgcccgcagcgcatgacctctacatggctaaaaaacggcggcacatgcaaatggaacggcggcaggaggaacggcgcaaggcgttggaacaggaagcctcgtttgtcaaagccaaagggcggtttttcggagtggagttttccgacggggaaatctgcatcagggtattggacagcgttgaagccatacggcaggagggcgaggccatgcaccactgcgtgtttaccaacgaatactatctgaaagccgactcgctcatactctcggccacaatcgacggcaaacgtatcgaaacgatagaggtgtccctaaaacgcatggaggtcgtgcagagccgtggcgtgtgtaacaagaataccccataccacgggcaaatactgaaactgatgaaggggaacatgtcccttatacggaaacgaatgacagcataaaaatcggggcggcgaaagccgcccgcaaaaacaaaatagaatgaaccaaatagcatataaattcgtgtcgtgggatgttcccgcactcgaaagccttgcaggctcaaaagcgtacatattacgcaaacggctcaatgacgggggaacgctcacccgtgaggagaaagactggattacccgtgaggtaaaccataacacctatttcaaggactccattccgcttttagggtatcgtttcaactttgtcgatgtactgaaaacattcgtggtaaagcagtacgggcattacacggaatacaagggcgtggacaagacgagcatacgctccatgttgtacggcagagtggaaaggattgtcgaattataaaatcggggcggcgaaagccgccctacaaaaaaacataacaatgaaaatcatctataaaagctacatggcacgcccgctcaaacccttcggggaatggaattgggaagttcgggaagcagtcaagacagccattgcgctcgtcgaggggaaaaacgggttcagaacccattccgagatatggcgaaggtgtaacctcgtcattaccgtgggacacaacatctacaccacgagtatcgagatacgaccacccgagcaggacgtgatacgccgcaggagcaactggcataacggctacgcctactactgcaacggcgtgttctgggcgaacatgagcagggttagagtggaacttgtctgattaaaaaatttcggggcggcaaaagccgcccgtaaaaagcgagaatatgaaaacgaatgaagtaaacaaggaaatctcctatgaaacgctgctcgtaaccttcggcgagggtatcgggcggctcaacaccatgttcgacgacccgcaggtgtggggcgttgccacgctgaagcagtggatcgacgggtatgaaactacgcgcttcaccgaaatcgacgaccgaacggcggttatcacatccgaatacaacatggacagcgtgaaggaatggctgcaaaagaacacaccgattatcaacctggaaaaacgataaaatcatgcgcaagtacaaattattcatcggctaccgactgctgggagagttttccggtatatgggaagccaaaaatttcgccgctgaaagcggcatgagcggaattttctcgctcgtgggagaaaattaccgggacagttggtacgaacccaaaaaacaggacaagaatggaaacaaagattaaagacatcacgggagcggaaataaccgttaccgacttaaaagaggcggtacgccaatgccgggagtgcctcgcaagtccctacctgatgccctcggggcataccgtgggggaaaaccatgcctacatgttgcggcaactgctcgccctgcaaaggcggaaacgggaacacggcaggcaacggccgtgaaaatacgacgcgaaaaaaatcggacgataacaaccgtccgatttttttgtttcccgtcaatcgaccgccgtatggtcgcccagcttcccgtgcagttcacgcccgatatgtccggcaatgccacggggagaaatttcagagattgaaccccacccgccatgcgtgtatatgcacgtcttgagcggttcggtacgggaaaggtagaacagatagccgttgcggagcaggatgcccacgaacaccgagccgacctcgatgtcggcgatctcgtcaaaacgtatcttcccgtcattgtataatactgccgtgccatccgcatcgggaatgacgaacagatcgtcttccataacaatcccgtgcaactcgattagcgaccccaggcattcactcgccgatacccggtcgtaatcaccctttacctcatttgtcgatttcgtttccatatcgcttttctttaggttcagacaaataccatacgaaaaaggcgtgagaatacgttaaataccggcattgaggtacagccaagcacccatccactcgatagataatttctccccacgccgctatcgcatacgcttgacgcatatagacacgacgataaagaagagaactacccattattttgcgagcggattaaaatttggctgttttcaatgccccaccataatgtgttccttccgtatgtaaatcgcccggcggcacgccgccggaggattcgattgcaaatataacgatttcatccgggtatcggcgacaacacgtgcgatttttaacaaccttcctgccaaagaactacccgccgtcctacaatttcggcccccgggcgggtttgcggggcgcgaccttcggctgcgccttcttctccctgggcggttcgacgatccgcagtttgagtttctccgtcttacggtcgtaacgcacctcgcagcagtcaatctcacccgcaaccgacgtccacacgttgttcacacgcaccgcgccgcccgagtagagggtcttgtattgttcgtattcgagcggctgccgcaatttcgcgtccacctgacggtggaacgaatagatattacgtcccttcgctatctcgtcgggaacgtaaacccgcaactctggatgggcggcctcggcatagaggcacagatccgccgtgcgaagctccctcggaacccactggatcatcctcgggtcgccccgcacggccgtatcggccacgagcggcgtgatggccgtctggggaatgtcatacagcacccccgcatccttgcgaacggcctccaacgccacctcctccgttacaagccggcggttcaggtgcaggacactcatcaaccggtgtatcttctgcgggtcgtcctgctcgcggaacacctgcaagaccagggcggggtcgctcaacgcgctgataaccgagaaatcggttttgtccttcccgtaggtacgctcgaaagcctcccggctcatctccggcgtccgggcttcgcgggggacgcctttcaggttttgcgggttctcccgcaccaggctcatgtatagatccgggcttttcatgctctcgggcaggtgggcgatggcatagggactgcgccgtatggcctccatgcacaactccggcgttttccacttctcggggacatattgcaggtagctcccgtcgtgcccgacggcccggcggcacatctcctcgttcttggcgtggtcgggaaggttgtagaacagctccggctccagggcgaaaatttcccgggccactttcggcgtgacgtgtgccgggttcatgtgctgcaaaaaatcgaaggtcttctcgtaattcgtgcaatagaaccccaacgccttcatgtgtatatcctcgaaagggatatagcggaggacacgcaggtcgtcggcacgggccaacgcccggttgcagacctccggcgtgagctgttcggggttgaaaaagcggatggccaggggatcgcgctccagcgctatctcgcacagacggtcggttttcagatgcttcggaacgtactccagtgccaggtagttcgaggacacggcagcctcgcagacccgttccgtgcgtaattcctccggcacttcatggagcaggatgccgtccccactgacggcacgcaggcagactgcctccgtgcgcagttccaccggcacgagcgaaaggcaggacgcgtccatccccacgccgtgaagggccagctccccggtcatgacctccggggcaatggaggcgaaaatctcgaacttgtccacgaacgacatcccgaattttttcagcccttccaggcatatatcgggatacggaatgtaagggagtatcttgtaatcggcactgtccaccgctttcaacgccgcacggcatatttgcggcgtcctcaattccccgggaacggcctccagcaccaggccgttgcgcttcacggccgccatgcacagttcgggggtcttcaacccctccggaacgtaatacagcgcgtagctgttgctatcgacggcggcacggcacattttcggtgtcttcagacggtcagggacgaatttcagtgtttcgccccggtagccggccgcggcaagacaaagttccggcgttttcatcgcttcgggaacgaactcgatgttgaaagccgatttcttgatggcgaaacggcagacctccgccgttttccgatcctcgggcagcgtctcgaaaaggttctcacgccacgggttctcgtacacccccgtatcgagataggctatatctattctctcttgctctgtcatggttttcagtatttatggaaagcgcccgggtgacgggcgcttctcttggttagacatattccgttatcgttccgtttcctccgtcccgttctcgctctggaacgtgaaggaggtcttcacgacctgacccgtgttgtcctcgacatagacgtcgatggtctgctggtcatcgctgcgcgatgtgtaatagaggcggaacacctcacggtcgagcggatagcggtcgttgggcaggaacaccgtaccgtcgtccatcctcaactcaccgcgcccgtcgggctggaaatagcggatcgtgtaacgtgcgccgtcatatctcccctcccgcacgagcgtgcagcggatttcagcggtttcaccaacggagattcgcttctgaacgggcatcgtttccagagagaacgtgtacgcctgctgtatatccagcccgttgtcgcaggatgcgcataaaagacccagggcggcgatccagaccgccagggccaatatctttttcatctttttcatgtcgcttgcaagtttaatggattatgaatttcacgcccaggccgaactgcgcgtggaaatgtcccgttgtagtgccccataggatacgctcacgccccgtcagcgagaggataatcctgtcggtcaggtacgcatcgacctccagcgtgacggccccgccatagaggaaacggtcgcggtggcggagcgtagagccgtcatagagccgcctttcgccccggttcacactctcgtaaccggccagcgccgagccgccgaggtagaagaaaaaagtcctggacgggtcggcgaggaacttgtaatagtaacctccctcggccgtgaactgcgccaccgggatacgttccgacttgtaggggtaataacggttcaggaactccgcgccgaacacccacttgtcggcattcttcgcgtagcggctcatggccagcccgaaccagtagcccgtttcgctgcggctgtcccgggtatagaagccgtcggccatgcctccccgtatttccagcccgcgcatggcgggcagggcacgctgggcgtgcgccccgtccgaaaggaggaggcataaccccagcgtgagaatgaatatcgcccgtttcatatcactttacctttaactcgttgataacacgtgcgcgcaccaggtcggcattctccaccgtgaaagtctggtgtcgcccgccctgctgctcgtgcagttccacgaccagctgcttgtcgtcggccagcgtgaacttcgggagcgtgaagaccatgcgctcggtacgcttgccgccgatgacctgcacgttgttgtacgcacgcacgggccatacgacctgctcctggatggccgtgcgtttggccaccttcttgtccgtaatcttgaacgtcaggtagtccacgttgaaaggcacgttggaggagtttttcagttggaggtggaaataaagcaggtcgttatgcacgtagatacctttgaggaggtattgtaccccgaaacgcttgcaaccgatatgcttgatctcgcggcggtcattcttgtaaatggactgcatgatcagtttgaccagcagcggagattcgcatcccaactcctgcaaatagatgtccagcgcgttattggggcggtttaccgcctccccgtcatgcaggaagtccgccatctcgaccgacagtttcaccggctcgtcggcatacttgacattgaagctgtaataggccccgtcctcggtaatgaccgaaaggttgctctcgcgcgagaaatcacgcagggccgcctttacacgcagcacgttttccgtgccatcggctttcgccgccagaagatccgaagaccccagatcgacgtaacggatggccgaggggaaaatcacatgcacggtcttgctgaacgtcacctccagcgcgtagggcgggataacccggttgaaagtcagcggacgggtaagaccgtcgtacaaatcgcccgtggagggcttttcctgcgcgtgggcagcgaacatgcacccgataaaagcgagtgccagaagaatctttttcatactcgataattttttgattgttgataaaaatggattttttcagtggtgtacggaagtacgtcgtttgtacccttattgaaggggcgggagcagcaggacgctgtaaccggccttgagcgtgaccttgaccgagcgcatcttcttgctcacgtattgcgacacgccctggatggcgctgcgccccaggtcggagagcagttgcgaaccggcatcgtccgtgatcgtgatactgctgcccatgcccgcgcccatattggcggcgatctccttcacggcattgagttcttccgaccccggcacgggaataccctcgttgccgttcgtgtcatagaccgacagatcgaccggaacgaccgccccgccgtgctggacagcgctgaccttgaccgtcagccgttcgccgttgatcctcgccgcccccgttacgggcgtacccgaggggatgagcagatctcccgccatcatcggttccagcagccggaaagtaacctccccgccatcggtgagcgtcacggtttgctgcacggcggcgcggatactgttgcgctcgggctcgcgaaggtcgctccccaccgtgttgaaaccccagttccggggcttgacgaactcacgggcgaagaccgaatcgggcagcggggcggcgagcagcgacacgatgttacggcgcacctggcgcacgggctgcacggaagccttgccggaaacggaggctttctgacgcggggcttcaggggcctgaccgccattcatgtagcgggcggcgatctcgtaggacttctccagcagcgccacctgctcctcctgggccgttttctgcgcctgctgttcttccaggcggcgttccagttcctcgatgcgggcctgcatctcgcgctcttcccccgtttcaccggcggtgtcctcgtagaaactgcctaactggcggttgatgtcggcataggcggcacgggaagtccggaaagctcccgacgaaccgccggcagagccggaagacttatccggcacggcagcgggcatgacgggctcttcctcctcgtcctccatcccgaacgcgaaatcctgcaaggagcgcatcttttcccgctccctgcgccgcatctcctcctgcacgtaggcatcacgcttgtccgagaggataccctccgattccggggtcggcagctccgtgttgaaacccgccgaaggctcctcccgttctttttcgccgggggagaagatcagccacatgcacccggcaaaggccaggaaaaagagcgggaagaccaccatcttcttccgcatctgtatctgccggggcgtgagttcctttttccccgcctccggctgtttattctgtttttcgttcgtcgtcataattgaaatcttttagatgttttacactgtcggcctcctgccgttgtcttaattccagctccagccgctcgatatgccgtatctgcatccgttccccggctcccttgccgaagcggtagatggaagacacggtaaagtagagcgacaagacggaaaagaacaagagcagcgtgaggatcacgataatccgcttatcgggcgagagcgccccgcaagcgcggcgcaggtggtcttcgacccactccccgaaagcctttattctcttctttgccatagccttatctttttaatgtacgtaaatcgcggttctccagaatctcgaatttctccatgatgaaaccctgcgggttattgtccgaacgccccgagttgatcagctcgcagcgcgtgaccagcgaacgctcggtgatgttgctctcgcggacaatcatttgccgggcataggtcatggcccggtagggataggcgttgaagtcgcacaccacggagtccacctcgatacgctggctgatgttccccgacaccacacggttgtagtaacctttctcctgcatgtcctggtaataggcgaaggcgctcttatcgaccaggaacagcgcgcggttgatgttgctctcgatggccgcacggtcgggcgagagggtaaagaacaactcgtgaaaacgccggatatgttcgcgcgcctccacggggcggttctggctcaaatcctgcgatagcgccagcatcagcgacttgcccccgtccaggacgtagatcttctcgcgctgcttttcggcgaaacggaagctcgcgaccacgctgaacacggataccagcgcgcacaggcagaggaacacgataccgaaaagccgaatctgcctgaaacttgtttcgatgttttttaatgacttgaattccattgtccaaattgttatgaatgattactgttaccttgtgttgccaggttgcgcccgttgggggcactgcccgaagccgggccaccgccgccgttaccggaggaggaaccgccaccgccgcgacgcccgaacgtgcggccgatcatgttgccggcgataccgcccgcgacacccgtggcgaatgccccggccttgttgataccgcccatagccccgccggctccgcccgactggatcacccactcggcaacggtggggatcgtgaaatagcctatgatacctataatcaaaaagataatatagacaccgctgccgctgtcgggaatgtagttggggtcttgcagggccaggacgtccgcctggagcatcaacgtctggatcttggccagcaccgcggagaacaggtcggcgatgggaagccaaaggtacacgctgatatagcgggaaatccaactcgcgagcgtcgagtggaagccgtcgtaaatggagagggcgaacgacaagggccccagaatcgacagcacgactaaaaagaatgtccgcagcgtgtcgatggtaagccccgcggcgttgaacaacaactcgaagaagtcccggacaagctgccggaaaccggccttgatgtcgtaccacgtgcgttcggcccacatgctgataatctcgcccaaatccgtgatacccatatccgcaagccgttgttcatacacctcgtcgtccactaaccaagccttgccctcgcgcctgcgggcctcggcttccaaatcgtccttctgttgctggtatgcctgcaaatccaatgtctgcccctccagtatggcgtgcgtgccctgcaccacgggcgacatcacagcgttgatcgtccccagaaccacggtgggaaagaacatcacgcacaagccgatggcgaaaggccgcaggagcgggaacacgtcgataggctccgcgctggccagtgccttccatacccggtaagccacgtaaaagagcgcacccaggccggcgatacctttcgccaccccgatcatgtcgccgcatagcggcatcatctcctgatacaggttccggagaacctggtgtaaattgtcgaaatccatgactgcctccgttttcaggttaccaatatctgtcgttcgggttcccgtaaagtgccagcacccggtgcgcgtcgcccttttcgcggctgcggatgaaggacacggagatggtcttgcgcgtgtaatagcgcgtgaggttgcggtactccagcatcttcgtgtaaacctgatccaccacgtccatccgctccttgtccgagagcgagaggccgttgccgccggttatgaccgtcttgagttccgccaccagcgcaccgccctcctccagcagccgggcgtaacccgccgagatcgccgccagctcgtccaccgtgaagttcgggtctgaaaccatacggttgaatcccgaggtgtagatttccgtgatctcgctgaccatttcgagcgtcagcttcaccttccgggcatccttgatgatgttatgcaccgatttgagggcgtcgtagtaagccttgctctggttataaatcttgatactctcttgcagcgacttgaccatgttggtcgccgtggtcgagctttgaaccgcgctcttgatgttctgaacgaggttcgacgggtcgatgaccgtccactgcgcttttgcctggtacgtgaagcaaagaagccccacgaacagcgttaaaatcaatcgtttcatccttttcattatttaattcgtgaatacttgggcggtcattccgacgcccggtaataatccccgtaggcggagagctggagcacctcgcgccccacatcgtaggccagggcgacatacccgtagaggtcgaagtaacggatacctccccaatacttcctcacgggacgggagaagcgtgtcccgtccttgtaggacacctccacgtaaaaaccgccgccccggcgtcccgggttgcggtagatgcgaacccggggagaacccgagcggctttcccactcgcccgccacctcgtacagcgcgaagtccaaacgcgccgccgtggggtctgatccgatacacttgcgatacatggcctgccctccctttaacgtttgccctcggcgagctgcctgatcgccagttctatatcaccgcccagctcgccggcaagccgctgtacctccactttctccgtttcctcggtcgtgtaggccaggtactccgggacgctgacctccgtggcatagaccgccgactgaacgccgcccagaccgatccagacctccttgtatttacgggaagggttgttggactggttgatcgagagaatctgcgccttctccttgtcggtcagccccaacaaggactgaatcgcgtcgaaacggttcatgaacttgcgctggtcgagcaggatcttgcagtccgagttgttgatgatcgcctccttgaccaccgggctggaaatgatgtcctcgacctcctgcgtcacaacgatggcctcaccgtagtatttgcggacggttttatacatataacgcagatattcagccatattggccgtagagagcgccttccaggcctcctcgacgatgagctgtttgcgtacccccttgagccgtctcatcttgtttatgaaagcctccatgatgataatggtgaccacgggaaaaagctccttgttttccttgatggaatccacctcgaagaccacgaagcgcttcgagagcaggtcgatgttggcccgggagttcaaaaggaagtcgtagcgtccgcccttgtaatattgccgcagggtgatgagcatgttgtcgatgttgaaatcctcgcggctgacccggatctcccgctcctccagctcgcggcggtagtcgtcccgcaggtactcgtagaaactgtcaaaacacggcacgatattccggtcggcgcggatacgctcgatataggcgttcacggcactgcccagctcgccgctctcggtcttcgtgatcttgtcgtcctcggttttccagagtgtcagcagcagcgtcttgatgctgtccttcttctccacgtcgaaatagtagtcgtcggtgtagaacgggttgaaactgatgggatgttcctcggtataggtaaaatacacgccgtcctcacctttggtcttacgccggatcagctcgcaaagaccctggtagctgttaccggtatccaccagcacgacatgcgtgccctgctcccagtattggcggactaaatgattcataaagaacgacttgcctgacccagagccgcctaacacgaatttattcctattcgtaatgatcccttttttcatcggttcgtccgagatgtccaggtgcaggggcctgccgcttacgcggtcgcacagcttgatgccgaaagggctggacgaggatttatagttggtttcctccgtgaagaaacagactgcgggctcgatgaacgtgtagaacgattcctcggcggggaaatcccccgcgttgcccggcatacccgcccagtagagcgtggcggcgtccacggtgttgtggcgcgggcggcactccatcagagcgagctggctgcccacatcattgcggatatgccggagctcctgcacgtcgtccgaccaggccagcacgttgaaatgggcccggacggattgaagaccgaacgagtgcgcctcgttgagatactggtcgatccactccttgtttatctggtttccgcgggagtagcgggaaagggactgcatgttacgcgcacgtttctcgaacatacgcaggttttcgtcgctgtcttccaggaacacgtactggttgtaaaggtggtcgcaggaaagcagaagccccacgggggccgcgaacgacagcaggcagtccgaacggtcggtggaaagacgctcgtaacgggtgtccgtacccacgcgccccggcaggtcttccgtgtccgagagcgtgtgcaggcacacccgtttgttgcccacgcgcagaacctcggcccccagctcgatgtcctgaagagaagtcgtctccgagagcgagagggaaaagtaccgttccagcaggcccggacaatccgccgtacccgtgatctcgtcccccgtgaggcggacaagggtcaggaaacccgaatcgttcagaatacgctcgaactgttccgccgcctccaggaattttgtcgccgattcccggtttacctctttgggaatgatgttgccccggcagagggtcgagaagtctgaacgcatgtgcatacgctccctcgtcgttttcgtcaggtagaggaagcaggcgtgggtcaggaacggacgctcgttgaaatgccgctcgtaactgcgggagaggaaactcatgtccccctcgcccgtggccgggcggtaacgctcgcggatgaaccagtcctgcttgtgtaccacgctgtattcgggcaagaccttcagggccttgcaccaggcggcgtggatcgcctcgtactcggcggacgtgacggtgaacagctccgggagttcgacccgatagacgaccgttatgtccgcgtccttgctgatgatacaaccgccttccacggccaggagcgggaacttgctttccagcgtggtggctttcaagatgtttctcatacgcggcccccctttcttttcagcaaccggcgcagggacttgcggttgagcaggtagcggggatgccggcgcgcggcgaacagcttcatcagcccgtgttccccgtaacgggcgttcaggcggaaggtaagccagaccagcaccgaagccgccgcaacgccgaaagcgatacatacccactgatcgacccctgccatgtagaggatgacgaacaccacgaagacggccagcaggccgcccgcgaagatgaagaggtactgcgccttcaggccccggaactccacgctcttgccgattcccttgttgattccatattccataattatttgcatgacaggttggactacaagaagaaagagcgtaggatcgtcgcggcgacaatcaggaaaatacacgcgccgaaccagctcgcggcggtcttcgacgtgtcggggtcgccgctcgaaaacttgttatagaccttgatcccgccgataaggccgaccacagccccaatcgcgtagatgagcttcgttccgggatcgaagtagctggttaccatgttggtagcctccgtaatgccggcgatgccgttgccctgcgcgaaagcggaggagatggcggcaaagagaaatgccgccggaagaagaatcttgttctttctcataactcgataatgtttgaattgtggcgcggggatggataggccccgcaccgggttaaacttcttgattcggattttttcagtggttcgaggatagcctcacgtgctacccgtagtctttttctttcatcgtgatgtcattatggggttaaacaaactcacggacgtcgaaacccgtgggaaccgaaccctgcggagatgggctttccgcagacctctcggacatacgccggtgaaaggccgagaggtaggtgtcgatcagggattttaccctgtcgttcccgtcggggcggcccgaaacgatgacctcgaacatgtcggtctgtttcaggcccaggaggacacgtcccgtttcctccctttgctcgtctgttgaaggtggatcatgtaccacgtggcggtaggcttcgcccatctgttcaaaactaaccccctgggcaagcgagcggcccaaaaggggcagctcttcggtgtcgtcttcatcctcgtcataatccggctcctccgcgtccgcatccgggaaagattcatcgtacagcggaaagtcgatttccagaggttcgttaggctccccctcgggagcgacaccgaacacttcatccaggtcttccggcggaatctgccgggggtgttcgggtacattcgtgggcacaaatatatcggctttttccgtaactttttcagtttcagattctacggcagcttgtggccgggagtggcgcgggtcgaggacaaagcggctcctgccgatgatctcctgccggcagggagtgtcttcggcaacgatcccgtctgccggttcgttgcgttccatccgccacaggcggaaaaacgcccacaaggcataccccacggcaaagaggggcagcagccacaacgccccgttcatcgctcctccgctttgggttgccgggaggccacggcctcacgctcctcgaaaagccgctcgatggtttcccggttatcgtccaggtgcgccttgagaaccttgtccacgtaggccgtgatcgtcacgtcgccacgaccgatgacacgggtgatctcgcggatacgctcgtgatacgacggacgtatcttcacgtgcttgttaccggcgaaaggcagccgcagcaggcagatgtaacgggccaggtactcggcctcgggggtggggacagtccccacggcgacctcccccgaagggccgtcggggacgataagggttttcatcctgcgccggtagcggcacacgcggaagatgaagggcacggcgacgcaaaggacggccgccaggataacagataaaataattgctttgtctgacatgatggattgtttttaataggttgtaaatattgggttcataactaaaaaatatcggagttccgtttcttgtagagttccgaaatttcctcctgataggtcgcgaaatgctgctccagcacattgtccaggtagctatacagcgagagttcgttcttaccgataacctgcactatccgggttatacgctcgtgaaactccttgcggatatacaccgttttgccgcttcgggtattggagggggcgttccggataaaaagacgctcgtaatcctggcctttccctcttcggcggcgtccctcctctttcgtagccggcgaggcggcggcctcgccagacggttccgatagagccgatgcctcctcctctttttccggcgtgtaaggatgtaatggccggtttcggcttttggcctggctgatgatgaaggaagcgtccaaaccgtcgtcatgttcttttccgctcataagatcctactttaacagttcgatcaattcatccacgagtttatccaggttgctgccccggatcaaagaacggtctgccgggaagagcgtggagcggaagacagagcgacggctggcgttctgctcacgacgaaaacgcttggtgtcaggcaggaaggtcttcagaacaggaagacccagctctttcattaccgcctcgtaaacctgatataactctgtcttttcacgtccgtccaccatgttccatagcatatacagccctttcatccgggacttctcgcggcccatgatatgctcctttaccacaaccgcgtaattcagggtgctttccatgacaacccggtcggcactgatcggggcgacgagataatccattccggccagggaatgaatcagatcctcgttattgatcgtaccgggaaggtcgaagaacacataatcgaaatcaccttgcggcaggaggtagtcggcatcggccaacgcctctttcgtgttgctttccacgacaggataggctttcttttgaagccgggtgaattgttcgtaagctaacctcttgtaatgttcgtcttcgagggcaagcttcaggtcacgttcccgcatctccacgatggagtgttggggataatcgcagtcgatgaccgcgacattgaaaccctttacatagtgcaggtaagaggctgccagcaccgtgagggtggttttgcccgctccgcctttctgggtggagaaggccacgaatttcgttttctctttcattgttccatgcgtttttagttatacaatcgggtaatcgttcatctcttcacgtatccggacaagtgacggcatgagattttatgctggtatgccggcacgcatatatgctggtgcgctggcaggctgttacgccggtatgccggtgcatgggcgcgtgtccgattttatactcatgcgcaaccgcatttgcttatccggacaaagacccgctttttcctctgcacacgatgttttctgcatccgtccgcacgtgtgcggacagggggatgtgtcattgcccgtatccgttctcacgtgcaaagtaaacccttaaaaacacgggttgtatgctctttttccgctatggccgcgtgtggcatcaaagtggacgcaagtggcgtaatcgcttgtagtacaagagattgaataggtcggtatctttgcctcgtgaacgatcccgacgctaatgaagccgtccttgccccgttttacggcggctctttcaatgttctgtccgcgagcgggcagaaggtatttgcaaagggcaaatagcaagctgtgttttctgctgcacgattctcgttttgcagcagaaaacagcttgcccgcaagggggagaaagcacctccggagtcggtgcttttcagaagggcggcaggccgcgaagggatcggaattttcaggaaccggtggggctctggcctctccttaaaatttcgatgcgatggaaaagaacagaaagccccgagggggcaaagggggacgacccgcgaaaaacgacccggccgtttaccgcttttcggtaaacttttcagccgtggaacatgcccgtttcctcgacctttacgagcagtccgggctattgtccaaagccgcttttatcaaagcgagagtgttcaacgaggcgttccgggtggtaaagaccgaccggggaacgctcgaatacgtggcgaagctgaccgctttccacgcccaattccgtgccgtgggaacgaattacaaccaggtggtgaaggagctgcacgcgcatttttccgagaagaaaacactcgcgctgctctataaactggagagagcgacacgtgaactggcggccgtcgggcagcaggtcgtgtcgctctccgaagagttcaaacagcgatggtagccaatatcaccaccggaaaagacgtgtacggcgcgctggcgtacaaccaggagaaagtcgatcggggcgacgggaaagtactgctgacccacatagtgagggagccggcggatgggcgcttcaacgtggccgcgacggcagaagacctcctgcgctggatgccctcgcactaccggacggaaaaacccgtcgtgcacgtatcgctcaacccggctcccgaagaccgccttgacgacgggcagctcgcggagatagccggggcctacatggagcgcatgggctggggaggacaaccttatatcgtattcaagcataccgacatcggacgggagcatatccatatcgtgtcggtgcaggtggcccaggacgggcgcaagataaacgacagcaggcgcaacgaacgcagcgtggccgttaccgaggaactggaacgggagtacggactgcatcccgccaaagggagaaggcgggagaaagggcaagggatcgtccccgccgattacacgcggggcgacctgaaacgccaggtggcagcggtaataaaaccggccgtggcgacataccgcttccagaccctcggcgagttccgggcattgctgtccttatataatataggtatagaggaagtccggggagagcggaacggaaccccctaccggggattgctctacacgctgctggacgagaacggggacaaggcagtggccgcgccgctcaaatcctcactgttcggtaaagaggtcgggtatgacgggctggaacggcacatggagcgcagcgccgaacggttcgggaaggacgacacgaggaggcaaatccgtggccgggtcgataaagcgcttcggggagaacccacggaggaagaactgcgcgaacgcctgcggggagcccgggtggatctctacatacgacgcaacgaaaacggccgcatcgtgggtgtgacgttcattgaccacgaaacacggacggtcgtgaacggatcacggctgggaaaggcatactcggccaacgccttcgagctgcgcttcggcggaaaacggaatcccggggaaaacacgaggggcttgtccccgaaacaagcgcctgccggacgggacgggcaacggaagcggaatacctcacgacggaggaaagtataacatctcaattatcattcatttattaaatcttacggttatgcaacaggaagacgaccttcggggtcttgctaaaacaatggatttcatgcgggcattgagtatcttgttcgtggttatcaacatctactggttctgctacgggcagatacgggaatggggaatcaatatcggcgtggtcgataggattctgctgaacttcgaccgcaccgcggggctgttccggaatatactatggacgaaacttttcgccgtagtgttcctcgccctttcatgcctcgggacaaaaggagtaaaagaggagaaaattacctggcggaaaatcacggcatcgctggccacgggaggcgtgctgttcttcttcaactggtggctgctggacttgccgctgacggcagcggcgaacgcggctttctacatactgaccctatcggccgggtatatctgcctcttgatgggcggcgtgtggatgtcccgcctgctgaagaacaatctcatggatgaccctttcaacaacgagaacgaatcattccagcaggaaacacgcctgatcgagaacgagtactccataaatctgccgacgaaattttactataacaaacagtggaacaacgggttcgccaacgttgtaaacccgcaaagggcttgcatctgcatgggaagcccgggcagcgggaagagttattgtgttgtaaaccagtttattaaacagcaaatcgaaaagggctatacccaatacatctatgactacaagtttcccgatctttcggaaatcgcttacaaccacctgctgaatcaccagaaaggttacaagaaaatcccgactttctacgtcataaatttcgacgacccgcgccgctcgcaccgctgtaaccccattcacccggacttcatgaccgatatttcggacgcctacgagagcgcctataccatcatgctcaacctgaaccgaagttgggtgcagaagcagggcgatttttttgtggaaagccccattatcctttttgcggccgtgatctggttcctgcgcatctacgacaacgggcggtattgtaccttcccgcacgccatcgagttcctgaacaagcggtacgaggatattttcccgattctgacatcctacccggaactcgaaaactacctcagcccctttatggatgcctggctcggaggcgctcaagaccagctccagggccagatagcatcggccaaaattccgctttcccgcatgatttcgccccagctatattgggtcatgtcgggcgatgacttcacgctcgacatcaacaacccggacgatcccaagatactctgcgtggggaacaatcccgacaggcaaaacatttacggagcggctttgggattgtataattcccggattgtcaagctcataaataagaaaggccagctcaaatcgggcatcatcatcgacgagctgccgacaatctacttcaagggactcgacaacctgatcgccacggccagaagcaacaaggtcgccgtgctgctgtgcttccaggatttttcacagttgaagagggactacggggacaaggaggccgccgtcgtgatgaacacggtgggcaacatcttctccgggcaggtcgtaggtgaaacggccaagacactctcggagcggttcggtaaggtattgcagaagcggcagagcatgacgttgagccgcagcgacaaatcgacatccatatccacgcagctggacagcctgatcccggcctcgaagatctcgacgctcacgcagggaatgttcgttggggccgtggcggacaatttcgacgaacgtatcgagcagaagattttccactgcgagattgtcgtggacaacgaaaaagtgaaagcggaaacggcccggtacaagaagataccacaaattaccgacttcacggacgagaacgggacggatcacatgaaacaggtcgtgcaggaaaactacgaacgtatcaaggcagaggccggccgcatcgtcgccgaggaactggaacgtatcaagaacgacccggtgctttgcaagctcctgccggaacagaactaaatgaacacaaacaccccacaaacaacctccgtgaccttaacgggggctgtttcttggttttataaccgcacagctggtgttttggagcataaagtagtgattatgtgaacggaaaacattatttttgtgttcggaatccttttaattataagtatgacagttaccgatatatacgaagcaatgaacagcaaggcggaagcgtttttcgagtggttgcaggctcacccgaaatacgggttgctgtttggtgtcgggctgcttgccctatggcttgcagggttgctgttccgttggaaatgggcgtgtcattggcagtttaacagcaaactgtggttatttgacgattgcaagcctgaaacacgccgcagggttcagattgtgttggtcagcgttctgattatacttatattggttggtttctttgtatggagataacggtatggaaaaggacaatcgcaaataccggatctgcttcatcgactatatgtggtatgtagccgagatatggcacgaaagggagcgtaccaatctcaacggacgtatgctactgttttggtgctggctcttcgtcctactcataccgcttggggttccgccgatattgcgccttttcggctggatgattggtttggccatagtgattcctctctgctttcttcccgatttattctgcaagctacgctatacagccggacggcgtgaagcgctccgtgaacattacgggaagatgaaacatcccggcaggaagctcgccaaaatagttcttatcgctatcgccctgatcgtggcaaatgtagcgctgatgttccacctcggatttatacattgggcatgatgaaacggcaggagaataagcaacggttctatctctgggactacctctggtggatgggggagaaattggaacaagcaagacgaacaggcagggtcgatggcgaaatgatgctctcgatttatatcttcgctcttttgatattccctatgatgactgttactatccggctttttccaggtgtgtcggcattgttgccatgtgtcgtttttagcattgtcacatttgccgttatgtcgctcgtcagcaggatttacaaatggcgaggcaaagcagtgatgtctcactatgccaagtgcaggtttaacgaactccttgcggttctgttatttttccttgcgatagccattatctgctttatgatgtatcttcttgacaaaaagtgaaacaagctttgatacgaactccgggccgttatatcgaatggtctaactcgatgtaccagtttcccttgatgggtttgtaaagcgtggtgtcgttgtacgtcctgcggtagatctcgttcaggtcgccatattcggtgatacggatattccgacggcttctcaatccgggatcgtaaacgaaactcttggacgttcccgcatccacgatgccgtgggagtagtacggcataacaaggctcacatataccgaatctgccgttccccattccctgcgatcaacaaggataaaaccgcatccaatctctgataacaaggagtcgagtaggattcgctccggcttcaacagtccatataccggaatgtcttgttcgtcattcgtttcatggaatgtatcgctttgttctgttgaatcaagtataatgacctcttccggagaaagcggcgggtagtgaaaactaccttctgaactctctgccatgatttcgtacaccttacggaacgccacctcgtgcgtggtgaaatggcgtatcatttcctcgtccgacggcggcatgggaggctctccgcagcttgcggcaagcaggattacaaataacaggattatgattggtgttctcattttctaatgtttaataggatgcagataatcactgtttaagtgattgatgtgcgtgttatcaatactttaactacaaactttaaaacaatcattcattttataataatagtttcgtatctatcaaaatgtattccttgaagatgatgtttcaatacaaggttcttaaattcctccccataaaaagtatagcgacaatttacattcggaagtctgaaaatagtttgctcttggattttatttttatccaacacaaatttatttatacaactcacccatcctctttctttatctaaccacactatatctgattctttttcaatcaaagcatctattatattggtacaatgaaaaaaataaaaaccttttggcgactttatatcaagaatttctccatttttgataagaatattttctaaaatacttaatgctttgtcgctaatagttaatagaggattacaaaattgtgataaatcaaaatgtttatgtctattactttttttccatatatattccatctcaggaggattccactgctttagtaaaccttcagcatgtcccatacaattttgccaatcttccacatttggaaaacgtaaatcgttaaatccttctaaactacctattaagtaaaagttcatattgtcgtactgtaattgataatggtttgacggggaacggcgttagtccgttatcccggcttgttaatattaaatttatgtttcctgatagattgtttcagaatataattctgtcgaaagaataatagattttaattctccattagacttataatcaaatgaatgttgtaacgtatcctgttcaatatcatttctatcaaattgtcttataactattttttgtaggcggtcattttcataaaaatatgtttcttctctacttccacgagaaccctttgaatacattttctctattttaccattacttccatatagataatatcggacattcacaatacgtttgctattatcatatgcaatagttttcatgagttccttttcataaatgaaaaaggtgtaatagaattgatttttaagttccaagccctctcggatttctataatttgattttttacatcgaaataataagtaaataggttattagttgttttgagagaagttacatttccaactattttcccttgcttaaacctgtttctttgataagaataaggggatatttcgtagaactcacctttgtaattctcttcccttacaacattcttatcaatttctcttttcaattcatcaaacatatttctcaatgaattaaaatcatctttcaatttatcaggtatcatagtgtttccttttaatattaatgtttggtggctaaccgacctttcaggggtagttaagccgcttgttagcaacctcttttcgttttatagattatttcagaatatccatttggaaatgatttggtaatactttctaaagccccatcgtcttgatattggaatatatgaattaaatcattaccactattaccctcaatatcatattgtttgacttcaatatgtgtcaaagcattttctttatagatataattctcttcacggcaaccatacctaccacataactgtgaccgtttcagctttccgccctcaaaaaagtaatggcatacattcatcaaatgttttccattatcgtatagaatacttttcacaagattgtctgtataatacaggaaagtgtgataaaactgattttcaatagaacaaccaaccttaacttctacgatttgattttggttattaaatccgtagatacaaagatttttggtgctttttattgtatcaggacgctttacaggttttccttgtttgcaaccattacgctgataggaatatggagtaagttcataaaactcgcccttatacaactcagtcctgacaacatcgtcttctatttgttgccttatggtttcaaagtcatttttcaatgcttcaaattcagttcttatagtttctccaatcattttcatctttttggggttgctaatgttcggcagcgttccgcttattcaatcggtttgctgtttgttatcggtctatttcttctgtttcaatcttgcctccaagttgttcaatttcttttcgatattcatccacaattatagagttccctattccaagtaaaattttatctcttgaacaaaattccttgatttcacttagtggaacagaaaatttcttttttaagtacagcataattttaggcaattcatttcccttgtctgcaagatatatattgtaaatcttaggactaatgattgtcagataatcatctaattccgtattctcaaattgcacaaactcggcagttggtaatattgcataacgaaaacaatccgattttgtatcacaaaacacaatggaataaccgcctctgttaagttgcttgttcatagcttggaacaacaaaggcaaatagtcacctcggcgaattttgtcccaatccaaagaatcctcaaactttttagtgttccataagaaacgttctatcccataattctttaacatcatcgtaatggaacgcttaacctgccctgaatattcttcaccactccaatcaataactgccattctgtgagaaactatagcaaaacaaagcataatatctacttcactaaattcattgtcttcagagcttgtatcgtaccatcccttttcaaacattttcctatgttgaaggacaaaggttctcttatctatattgaacaactgaatcatttctaaaaattcatcatagtgttcttttaataacactttagcgaataattgaagtttactatccatattttaatttttagaccgataatgtttgttggataatcgacctttggaagattaatccgtatgctatcgtttatttcaacttaattagtttttcatattgacaagaaacatcaagaagtttatctactaattcatctccaagccaacaatctattagatatttgccataacttggtgtaaacgagtaaatatctttatcaatcgcattaatcatattttccaattctttttgtacattatgtaatgcaccatcaggaagagaagtcttcctacattcaaaaggttgcgctaatattctttttacatcatcaagtatattcacacaacaactttttactgtttcttttctacttaccatattaaacgataatgttcggcgaataatcgtcctttagggagattgatacgcttgttatctgcctttattcgctttgataagtttcaactacatacaaatcaacattaggataatcatttgaaactgtctctataattgcttttacatcatcccattttaatcctcctaatccagcaccgattgcaggtaaggctattgccgttacattatcaccactggctaactcaagcatctgtatcagtgccttttcgatatactctattttagctcgtgttcgccacgttgcttgagtaccaaggttatatatatgtccattgccataatcataatcaaaaacatcaccggggcaaaacttattttctttgcacaactgcttatattcaagatacatatctggatatttgcttttgaactgtacggcaatgcctttacccattgcaccggcacaattacaaccatgcgcataactgctcactccatcaatacggaatatgtcgcctttttcaatatacctaatcattgtttttttcttttttattgttaattattctgggcagataatgtttggtggctaaccgacctttcaggggaggttaagccgcttgttactaacattttattgtgtcaattcattattagttttacaacagaccaatgacatttgcaacaatatatattgtcgctatgttgttctataccttctatatctatcattggaagttgtaatttctttcctttcatcacaatctcaaactcattgaaatgccaatctttaagttcttgtttttctattgtgaagccacaactctgtaaaagtgttgtaagctctattataggattgcatattgatttgtattgacacatattattttttccttgttagtaatgtccggcagataaaccgccttcaatgtttcatctgtttgttagcaacctattttctatcaatcttttgtaaaagttgattgtaatacttctctaacattttgatgttattttttctgtcaatttttccactttcattatctgtgtatgcaaaccacttaaatagcaattcaacaaaaatatgtttaccaatttctgttaaagaactttccttaataattgaaggcatgattaggtttccttcattatcacatggattatcacacaaaagcccctttccgtatgcgtagtttaataagttctgacaacagacttttgcgtagtctttatctctctgacggatttgagcttctataagtccgtcaacatcaaaaattatttggtcactcatattctttttagtttgtaaagttgctaatgttcggcggataatctctcttacggagatttatccatttgttaccgatgtgccatttatttctatttctttaaattttaaaaactcatttgccttatacaaatgaagtaattgcattttcatattttcattgacaatgtttttataaaaaccgtatttattccacccttttaaaaagaacccatctacagatgaaggtattttagacatatctaacacaagtgtactcatgcattcaaattcttctcgtttggaatgaatattgtcaacacaatcaattacttcattaaaaataattgccatataatcaagtgggaaatctccatatactgaaaccctttttaaagaaattccttttatggaggacaattcgtttatattcaatatatcttctctgacaagaaacaaatggctgacttcagcaaattctggcattcttatttgcccaaatccagatatacttttagcgattagccccttacctttgataagagcttttatctgatacctttccgatgaagatgaatctataattctttgaaaattaatttctttatcttcatatataaactcccacgaatatgtaatacatttcttccatattcgattttctccattcaagtatattttataccatttcatattgtcattgttaatcggtaatgttctgtggataatcgacctttataggagattaatccgcttgttagttgcatatttataatctcgataaaaggatatttagctcctttatttcctgcctttcatcatcatataccaaagcatttctatatgaatgattgcttgtacatatcgttcctatcttgggaatttcttgtatgtcagagttggatattaataatccattcaagatacatttacctatatatgcggaatgttccttgaataagggaatttgttgcaatcgttggattattgcattaagtgctatgcctttttcttgttccctgattgcagacaaaggtaagagtaaatggaacagtacatctccatatttctcttttgtaatcctcattaattccgaatatgtgagatacttcaagtgaaagttgccactaacttccccgattaaagtgtcattcaaaaaataatatgtacagcaaggatgaaattctattgtcaatacaatatcgctgccgataggaagtgttagagttcttgggttttctatttcaccttgattttcggatgttttcaaatcaatttgagatagccaacaccaatatttcttgtacttctttttatccaacaatgttagtacaagttcttcatcccatacttcatcaaaattcacatccctttcttcatcaaaggcttgaatatgatgatgcaacattacgttccaaaaaagtgcatttgagaacgaatattctttttccgatattacattcatttttatttcattttgggctgcaactaatgttcggtggctaaccgacctttaaggggaggttgagccgcttgttaatcgtctttattggattgaatgtattattaaagatacttcgtctttttgataaagataagtttttattatacaagatgttttttgtaatgataaaaaaactttaaccgacgcttcacaatagggagacaaagaatcaaataggactaattcagtagaatcccattttacttcaacttcttctattggttcaatcccgtttacgatatcattctccagaagtttttccaccgttaaataatcgggagcatacttccagcggattattaagattgctccatctttatttactatgcgtgtagccatcggttcatctcccattaccaataagacatgattgtctatatagattttccccaagtaatctgttacgctacatatagcattgtagttttcttgacccttccattgatgggcatattgttgctcaacaatgacaaatgggcttcctgatgtttcaatccaattattcatatttttctcagcgattaatgtccggcggataatcgacctttctggggagattgagccgcttgttatctgccactattcactttgataagtttcaactacatacaaatcaacgttaggataatcgtttgaaactttgttcaaaacagcttttacatcatcccattttaatcctcctaatccagcaccgattgcaggtaaggctattgccgttacattatcaccactggctaactcaagcatctgtatcagtgccttttcgatatactctattttagctcgtgttcgccacgttgcttgagtgccaagattatatatatgcccgttgccataatcataatcaaatacatctccggggcaaaacttgttttctttgcacaatagcttatattcaagatacatatctggatatttgtctttgaactgcacggcaatgcctttacccattgcaccggcgcaattacatccgtgcgcataactacttacaccctcaatgcggaatatgtcgcctttctcaatatacctaatcattgttttttcttttttattgttattttattctggcagataatgtccagtggataatcgacctttaagggaaatttatccgtttgttagtcgctttattctgcaatataagtttccaaatattgaataccgttgtaactgtctaattcatccacaaattttttaggtgtttcatatgaatcataatttttcttcttaataaagattttctgattccttttgttgtccttgaaaccattgggtatatagcacacaatacaatttgatggctttatgtggtattcatcaatatcggattcaatataccagtcaaggacaagtttgttatcaatcatcattctaacaagattaaaaggattttcgggttcatccttaatttccacagttagaaattctggatagtaatactttatattaacgtctttacagaactgacagcgatgttccggattgggacgtttctttgtacgaccttcttcgtaatctcgtatttctttcatgtactcatcttgattgaaatactccataaattcttcccgacttttagcggttgtgccaatccaaatcatatattctaatccagcattagacccttgcattccttcaggcgacagttcaaactcaaacgtaccaagataagtcatggttgtggtattctctgcctttttaggagatataccctcacgacaattatagcagataacagcatttgccattgtaatatttttatcagccatcgacagacttatcttttgggtatcagcaggaataaggttgagtaatcctgccaagccgtcagatgtgaatttcataataagaaaatcctcatcatagctcattacaccaagctccttacagaactggcaacgaagttccttattgtcttcatcgtaatctttccaccattgacggaaagccgattgatccatatatttctcaaagtcagcttcggaatcgaattgaccgacccatatcattatcttactcattttctttttttatttttcaagcgactaatggcttgcgaatagctgaccgttagggcagtttattcgcttgttagttgccttattccattaaattcccatcaggtaaaataatatctccgtcatcactactcacatcgaagaagccaacaccatatttctgcgccaaggctttcatcttttcgtatgcttcttctgctaccgaccacgcaaatgctgcataaatgacattatgccctatgctgtaatcggtcaagtgtgcttcggcatcatcgtcttccacctctacgtcagaagcatccatgtttggaaatgtcttaatcatttcttcataccattcccgcagggcagacgatgtgacggcagggtcgttgtaaccgtgttcttcactccattctgtttctttgtcataccatacaagaaactctttgcgtttttgcggagcttttgtccgctcgaaaaccattaaatcgtaactcataatttgttatttttatgtttcacatattatttttctacattggcaactaatgttatactatcagccgatttggctgttattttctttaagtatcagacctcgtcttcctccatcaacagatcgtccaacgggcttttgatattgcttttgaaagtgtcggctatgtggacatacctttctgtcgtcttgatattgttatgtcccataagctctttcactatcttgatgtcggttccctgctccagcaggtgagtggcgaacgaatggcgcagcaggtgcggataaatccgtttcgtgattcccgcttcccgggccgctgccttcagccgtttcgacacgatactctcggtgaaaggttctcccggtctgtgttcaaaaagccacactttcggtttgtatagtctgttatattccgtcagctttttcatcaacggtcttgacagcagggtgtagcggtcttttttccctttaccctgccgcacccgtatcagggagcgggattcgttgatgtcgccgggtttcagttccagcagttcgctgatgcgcaaccctgcggaatagagtatggagaacatacagaagaaacgcaggtctgtcaccgtcacgtcgagtattttctttatttcctccttgctcaacacgtcgggcagcgtcttctcccgtttggcacggttcaccttgtaacaccgccgttcctgaccgagaactttctcgtaatagaacttgatggcgttgatacgctggttttgctggcaggaggatatgtttttctcgtggatgagatacagcaggtagtcgtttatctcgccgggagtaaccgtttcaatcttacgcccctcgaaatgctgttggaaatcgcggaaataggaggtatatacccttacggtatggtcactgtaacgcacttgctgaagtttttccagatagccttccggcagtggcggccgtttgtcttcctctttacggggtgcggtttccttgatggcagaatagtctataaacgccatttttacatagcggtcgaagaactcggcaagcacgaaatcttctgccggcagataagccctgccgccgacaagcagtacgttttcttccttcgacagcgacaagcggatgtcattgtcattaccgaaagtcacttcgacaaattctctcccgtttcttatcaccggagaaagtttgatcttggtttttggggtatatatttccatgcctcacgttttgtcggatattgaaacccgttttcgcaaatttataaaaaaacacgggttatccatgcgctttattgacatttaacaatagatcccgactacctgacaaataaggtgaggagccacgaaaataccctctgccaaatccgtccttcccggcactccgtttctccgatttcctctgccctgcgccacaagcggccacttctgtgcccgatgcttccatagcctttccaactcttttacgttcagccggttccccttactttcgttcccgcatcgctattggtgctaactaaaaacactcgtaattatggacgaaaacgtaaagaacgacgctaaacaagtcatgctcgttcagaatgccgacgacggacgactacaagccgttaccggcgtggatcaggacggcaatatccagaccgccgaccccacggatcagaacgtggcgagcctgctgaacgtgaacacgcaggattcagccctcgaagccttcttcaaaaagttcatggaacaggcccagaaccccgtccacacgggtatcttcgtcatgacggagaatgccctgaacaaacttatccgcatcgacttcgacccggagattctggaaaattaccgtatcgacccctccgaacggcttcagacgcaggagcagcggcagttcgagccgctggacgtcacgaagatagacctggcggatatggagaagaaaggtatccgcatggaggacatcgagccacacctgaaagccatgtcttacggacataaatccaacgggctggtggagatgaaccccgaactggagaacgggatgcgtgtttccaccaaagggcgcgtgtcgctcgaagagcaggcggacggctcgctgcgcgtcgtgccgcattactggcaggaacggcccgacctcgacgcccccttccacggggtgctgctcgatgaggaggcgaaaacgaacctgatgaacacccgtcatgccgggaaagtgatcgacctggagctggagccgggcaagctcacgccctgctacgtgtcgatagacaaatggacgaacactctggaacccatgcccgtttcgctactcgaaaaacgtgcccgtatcaaggaggccgacctctcggaaggcaagcagatggatttctacggcggcggcaaggtgttgctcgaaggatataccacccgcgcgggttataagcgggatgcctatatccaaatcgacgcggccgaacgtaactattcctttacctacgacggtttggatcgcaaccgctacgcccaggagaacaaggagatttaccgccagaaggccgccgagaaaaacggacggcaggaaactacggcctccgaacgacagcccacactcacgattcaccggacaatcctcaaagcctccgtgcccaaagaggcttatgaccagtggacggaagcggtgaacgacccctccaagcgggcggatgtcaaggctttctacatcaagggcatggtcaaggacgggcagggtgagccgttcaacgcctgggtcaagcccaacttcgagcgtaacaagatggacttcttccgctggaatcccgaccgtgcgaaacggcagggagcggaggtcaaacccgccgttgaaagccgtacccaggtcgccgtcaattccgagggcaagaccgtcgaagcggtcaaaggtgtgaaagagccgctcaagcagggacagcaggaggccactccggcgcaaaggagaaattaccgcagctgcaaaaagagcaactccaaaggtgtcaaggtataacgtatgaaatggttctacatgcagaccggagccatgccgctcctgatcgcagcgctggccgccttatacctccggccgggtaaacgcagccccccggaggaggcagacgacggacggcagtattacgacgggaacagcaaccatgtctattacgaccgccggctgatcgcccgtccggaaaaagagaaagaagaactacaagaaaacaaccactgaaaaatccgaatcatcatgcaagttattatcgcagaaaagccctcggtggcgcgtgagatcgccgccatcgtgggagccacgaaccgtaaagacggttttatagagggaaacggctatgccgtaacctgggccttcggccacctggtcgggctggcaatgccccaacagtatggcatcgcgggtttccgccgggaaaacctgcctatcctgccatcatcgttcatcctcctgccccggcaggttcgggagggtaaagagtataaggccgacccgggtgtcgtgaagcagctcggtattctccgggaattgttcggcatggccgagcgcatcatcgtcgcgaccgacgcggggcgtgaaggggagctgatcttccgctacatctactcttacctggaatgccgtacccctttcgtgcggttatggatcagcagcctgaccgaccgggccatccgcgaggggttacaacaccttcgccccggcaacgaatacgacaacctttacctctcggccaaagcccgcagcgaagccgactggatcgtcggtatcaacgcctcgcaagcgcttgctgtggctgccgggcggggtgtctggtcgctcggacgggtgcagacccccacgctggcgatcatctgctcccgttacctggagaacaaggcgttcaagcccgccacctatttccggctgaagctttccacggcaaaggagggcacggagttcaccgtcctctccacggagaaattcgacggcagggagaaggcggaagcagcccgcgccgaggttatcggcgcccgaacggtacgcgtcgtgaacgtggagcgcaaggagaccagggaacagccgcctctcttgtacgacctgacgacactccagaaagaggccaacagccggtatggtttttcggcagaaaaaacgctcgacatcgcccagtcgctttacgagaagaagttcatcacttatccccgtaccggctcacgctatatatcggaagatgtggccgaggagattccggcactcatcgggaacatgacacgctatccccgtttcgcggaatacgcgagcaggatggataccgcatctctctcccgccgaagcgtggacaacgaaaagatcgccgaccaccacgcgctgcttcccaccgagaacctcccttccgaactggatgccgaccaccgcatcgtctatgagatggtcgcggggcggatgctcgaaaccttttccggggcctgcgtgaaagaaaacacttcccttaccctgcaaagcgcggggcatgatttcacggcccgcggcagtatcatggtcgagacgggctggcgggccgtcctgaatgaacctgtcgaggagaaagaggaggacatgaccctccttcccgacatcgtacaaggcgacgagctgcccgtcaaaggatgcggcacggaacagaaacagacccggccgcgcccccttcacacggaatcgagcctgctggcggcgatggaaaccgccggacgcgaactgtccgacgaggccgaacgcgaggcgatgaaggatgccggcatcggcacgcccgccacccgtgccgccatcatcgaaacgctctttgcccgcgagtatgtcaggcgagagaaaaagtcgcttgtacccacggacaagggactggccgtgtatgccgtggtcagggacaagaagatcgccgatgtcgccatgacgggcggctgggaactggccctctcgaagatcgctaccggggagatggacgccccgacgttccatcgcggtatcgaagtcttcgcctcgcaaatcgccaaagaactgctggaagcaagaatcgacggcgcggagagtgacacagcctgcccgcgttgcggcaggcccgtggtgttctatcccaaactcgccaagtgtcagaatcccgattgcggcctgaccgtatggagaaccgtggcccgcaaggagctgaccgacaagcagctcgcggaactgctgaccaaaggcaaaaccggcacgatccgaggattcgtcaaaaacggcggcgggacgttcgacgcggccctcacgctcgatgaccagttcaagacctcgttcgttttcgagccacgcgatactcccaggcagggaaagaggaacaaacggaaataatcgttacctttgccactggaaaagacctgtcataacgagatacgcttgtttgataaggattttttcagtggtcggcgcttcgggtgggaacccggggcgcctttctcttccccgattatcaacgaccactaaaaattcttatcatgccagacaagcaacaccatacccccacgggggaattgtcctattacggactttcgttactatcctacctcaaggacagccacccggaactcatcgccgaaggtgaattcatcgccgagcgggccgacagcgccgcccaagcgtacagcgaggcgatccgttcgggctgcaaccacatcgaggccgaagaaattgcccgcgaggaactctaccgcggactgcacttttcaccctacaacacgctggtaaacatcctctggagggaattcgaggcggagattcccgaggataccgcccggcaggcggctctacgcctgctgcccctctgccgcggagtgctggagaagtacgacctcacggacgacttcgccgacacgcccgactacgaactgttctataccgaactgacgggaaccgtccaaatacttctcgaagatggcattcaataagaaaacccacctccgccagaatatcgacgcgctgaagacggccttcacgctcgacagggaacggcgggcgccgactcccgaagaagaaaggacactcggcgcatacagcggcttcggcgccatcaaggaagtgctggaaaaccccaccgggaaaccggacaaggacggcatggcaacgctcgtggccgagttgcacgaggtcatcagggcgaatactcccgacgaacgggaatacaagcgctacatggacgggatcaagaactccgtcctgacggctttttacacgcccccgaaagtggcagacgccatcgtggaggcgatatgggacacgcggatcgtcccaaaacgtattcttgaccccagcgcgggaacgggggttttcgtcaatgccgtggatttccacgacccctacgcggagatcacctgcttcgagaaagaccccgccacggggttgatcctgaagcacctgcatcccgaaaaacgggtgcgggtacagggattcgaacgtatcgaacccaaatacgccggttactacgacgtggccgtgagcaacatccctttcggggacgtggcgctcttcgacccgttcttctccacccataccgaccccgtgcggcggcaaggcacacgggcgctgcacaactattttttcatgaagtccgtcgatatggtacgcgagggcggcctggtggcattcatcacctcgcagggagtattgaacgccgagcagggacgccccgtgcgcgagtggctgatgaaccgctgcgagcccgtatcggccatccggctgccgaacaacctctttacagaacacgcagggacggaggtcggcagcgacctggttatcctgcaaaagaaagccgccacgggggaactgtccgaacggcagcgggatttcatcgaatcccgcaagctgtcgaacggcatccggataaacaaccttttccagtcgttcgacagagtgatccataccgaggccaaagtaggcaaagacccctacggcaaaccggcgatggagttcacccacgcggagggcgtggacggcatcgaccgggagatgcggcgtatgctctcggaggatttcaaccggcatttcaacgagagttattgcctggaacatgctccggaacagacacccggtacaccggagcgggaattgtcccgttcccgtcaggcggaacgccagcgtgccgaaagatacgagccccgccttgccggagaaatcgtcaaggagattatcgccgacgcccgtaaccttcagcagcagcgggaagaggaggaaaaacgccgcgtcgtcgcagaaatggcggcgcagggctaccatgtcgataccgaaaccggggagattacccgaatcgaaaacaaacccggacaagtgttaccggattctgccgccacacccgccggagaaccgaccggagaggatctggccgacttcggggcctggtcgaaggagcgggagaatcgcttgtgggagcagcacccgccgaaacccgaagatttcggcatggcggatactcccgtgcagcacgtgggcggaacaacggaaccgaaaccgcgggagggcttcgccgggtcgcttttcgacacggtggaaacggcggctgccgaaccggtaaacgtgcagcaggaaccgttgctgacgctctacgacctgttcggcttcagcgccgaggagcggcggcaggcagaactcggtatatccaagaaaaggaacagccgccggggagcaaagcggaagacgccccggcaaccctcgttattcgccccggcctcctctccggaggaacagaagagcgaaatgccgaaaacgacgccaccggagcgtgatcccgaagacttgtatgcctccctgaactgggaggacaacccgccgatcaacggcttttacgagatgatgatgtcgcttaccccggaacggagggcggaactgcgccgacaaagcgcccggcagcaggaaactccggaacagcgggaacggcaggcggtacgccccccgacggaagccccgaaagacagacggaaacaagccgccggtacgccgagaacgggcagcttgttcgacacgtcggaaaatccggaggaggaagaacccggtaaagaaacgccacagatacgggaggtggatatgaaaccccgcccgttcgagggggaggtcgccccctatttccgcgaagggacactcgtcacggacggacaaaaccgggtcggctacctgcgggggattgaatccctgcaacccatgttccacccgctggaactcacgcctgcacaacggacgaaagcctccatgtatatcgagatacgcgatgcctattaccacctttataacaacgaggcggaaacgctgacggcgaaccccgccctgcgggagatgctcaaccggctttacgacaatttcaccgaacgcttcggacggctcaatgacaaacgcaacctcgacctgatcaagatggacgcgcgggggacggagattctatcgctggagcgttacatcgacggcaaggcacgcaaagccgacatcttcgagcgtcccgtggccttcaatcccgatgagatcacgcacgccgacgatgcttcggaggcccttgtggccagcctgaacaagtacggccgggtggaacctcgctacatggcatcgctcacgggaactaccgtggagggaatactcggggaactgaaaggacgtatctattacaacccggaaacggacggctacgaggttgccgacaagttcatcgccggcaatgtcatcgggaaagccgaacggatcgaggcgttcctgcgggagaatcccgaccacgccccggcccgggaatcgctggaggctctgcgcgaggcgacacccaaacccatcgctttcgacgacctggacttcaacctgggcgaacggtggattccaaaaggtatttacgagcgtttcgcctcctcgctcttcgatacggaggtgaagatcaccttcgcctccaacctggacgagtacggcgtgaaggcggaagcgacgaacgtgaagatcacggagcagtatgccgtcagcgcgcagacccgtaagtacaacggcctgcaccttttgaaacacgccctgcaaaacacttcgcccgacatcaccaagaccgtcctcaaatgggtggacggcgaacggcgggaggtcaaagtgcgtgacggggaggccatacagctcgccaacagcaagatagacgagatccggggtgctttccccgaatggctgcgcgagcagtcgtccgacttcaaagaccgcctgacagacctctataaccgtactttcaactgttacgtgcgcccgaagtacgacgggacgcaccaggaattccccgacctcgacctcaaggggctgggaatagacaatctgtatgacagccagaaggacgcgatatggatggacaaactgctcggcggcgggataatcgaccacgaggtgggcggcggaaagaccctcatcatgtgctgcggggcctacgagaagaaacgcctcggactggccaacaaacccatgattatcgggctgaaagccaacatccatgaaatagcccggacgttctgcaccgcttacccgatggccaaagtcctctacccgggcaaggaggatttcacgccccggaagcgtgagcgcatcttccgggagatacgcaacaacgactgggacgccgtgatcctctcgcacgaacagttcggcatgataccccagtctccggagatacagcaggagatattgcaggccgagctggactgtgtggaggagaacctcgaagtgctcaaagcacaaggcagggacgtttcccgcgccatgatgaaagggtgtcagaaacgcaaggccaacctggaagccaagttgcagaaggtggcgcacgcgctggaaacacgcaaggacgacgccgtggacttccgcctcatgggtatcgaccacctctacgtggacgagagccacaaattcaagaacctgactttcacgacccggcatgaccgggtggcgggcctcggaaatcccgaggggtcgcagcgggcgctcaacatgcttttcgcgctgcgtaccatacagcagcgcacgggccgcgacctgggggcgacgttcctctcgggaacgaccatctccaactcgctcacggaactgtacctgcttttcaagtacctgcgcccgaaggaactggagcgtcagaatatccgcaccttcgatgcctgggcggccatttttgccaagaaaaccatcgactacgagttttccgtgaccaacgaggtcgtgcagaaagaacggttccgatatttcatcaaggttcccgaactggccatgttctactccgagattacagattaccgctcggcggaggatatagggatcgaccgaccgcaaaagaacgagatattgcacaatatcccgccgacaccccagcagacggagttcatagaacggctggtgcagttcgccaaatcgggcgatgccacgctcctgggccgcctgccgctctcggagcgggaggaaaaggcgaaaatgctcattgccacagactacgcccgcaagatgtcgctcgatatgcgtatgatagaccccgaactatacagtgaccacgtggacaacaaggcgagccactgcgcccgtatgattgccggttactaccgccgtttcgaggcgtacaaaggtacgcagttcgtattttccgacctgggaacctacaaacccggagcggggtggaacgtctattccgagatacggcgtaaacttgcggaggattacggcataccccaaagcgaggtgcggttcatccaggaggcgacctcggaaaaagcgcgcaaggagatgatcgccggtatgaacaccggaaaaatccgcgtactcttcggatcgaccgagatgctcgggacgggagtgaacgcgcagaaacgctgcgtggcgatacaccacctggactgcccctggcgtcccagcgacctggaacagcgcgacgggcggggaatacgcaccgggaacgagatcgccaaactccatgccgacaacaaggtggacgtgatattatacgccgtcgagaagtcgctcgacgcctacaagttcgggctgttgcacaacaagcaactgttcatccgccagctcaagaccaacaacatgggaagccgtaccatcgacgagggggccatcgacgagaagagcggcatgaatttttccgagtatgtcgccgtcctctcgggaaatacagacctgctggacaaggcccgcctggagaagaagatcgccacgctcgaaagcgaacgccaggcattcgtgcgcggcaaatcatcgagccgctacaagctggagcagatcacggaaaagatagagaagaacaacgacctgatacggcgtatcggcaaggatctggaacacttcaaggcccgcgtcgagttcaatgaggacggctcgtaccgcaatcccgtgaaactgaacgggctggaaacctccgaccccaagctcatcgggaaacagctcaaccgtatcgccgaaacggcacgcacgctcgacaggctcgaacctatcgggagcctctacgggttcgagctgctcgtccagagcgaaacgaccgggaaagacgggctcgacctggtgcagaaccgtttttatgtccggggtgaaggggattatctctaccagtacaactacgggaatatcgcctccgacccgcgactggcggcgatgaacttcatccacgcgctcgcaaccatcgagccgacactggaaaaattccggaaaaagaatgaggaactggagaaagatattcccgtcctgcgggaagtggtggaaagttcctggcgcaaggaacccgaactgacggccctgaaagctgacctgacggaaatagaccgcaggatacagcaaagcctcaaaccgatagaggagagcgagggaaaggaggcggaggaggataacgacgtgtgccgggagcggcatgacacggcggaagagctcccggggaaagacaacacggcggcccgtattccttcccggctgcggcagattgccgacgcctccggggggcgcatcgtgatcgcgggcgtgggcagcccgccggagaacggccccgcgaagaaagggatcaagatgtaaacgaaaagccgacggaagtacagatttccatcggcttttttcatatgtccgtgagcgttgtcgtcacacttcctgcaagagtgtttgcagctcctcctgcgtgggaagataggtcatgtactgggcggcgaagacctgcttttcatcttcgggcagcgtataacggacgaccgcgtcgtttttctccgcgcagaggacgatacccaccggagggttatccccgggattcatcaactcacgggtgtagtaattgacatacatctgcatctgccccaaatcctgatgggtcagctccccggatttaaggtctattaaaacgaaacaacgggccaggtaattgtaaaagaccaggtcgatgtagaaatgcttgtcatcgaaggagatacgcttctgtcgcgcgacgaaggcgaagcctttcccgagttcgagcatcaagcgctgcaagcggctgatgagcagttgctccagatcggtttccagaaaatgctctccctgcgggataccgagaaactccaggatatacgggtcgcggatgatctctttgggttcgacacgtccgggttcggtacgggaaatctcctctttcacggctttcttgtctcggctggccagcaggcggtcatagaaaagcgtgttgatttggcggtcgagctgccggacactccagttttccttgacgcactcgtgcaggtaaaaatcacgggcggcatcgcccgacaccttgagaagcgtgcggcaatgcgaccaactcaatttatcacacagcgtgtgatatttcgggtagcactggtaaaactgcctcatgtaccgcaggttggtggccgtgaacccgtttccgaactccgccacgagccgcctggaaagggtgttgatgacagccttgccatatccggcacggccggttccctgctgctcgtactccactatatatttccctacctgccagtaagccctcacgagggtcgaattgacatgatgtatcaccttcgcgcgcgcttcctgcaagatatggcgcacgttatgcagcagctcttcctcccctttgtcggcaggatatattttatcagtttctttcattgcttcattattatataggcttccaagtgcaaacatactgattttacggcaaatatcgagcggttgtaccgccttgtcgtgccttattccatgtatctccgcgtttttccatgacgccggactctcgggacagggcctaaccggaaccggcaggacgatcctttttcagcttacggaaattactgaagttacgctcgatgaaccgcaggacgtccgattcccggtagaaggtcttgtgatagatcatctcgtaaggcagctctcccgaggtgcggtaacgctggagtgtgcgcttgctgatattgagcatacggcacaggtcgtaattgtccagaagacgctccccgtcaggcaggatggaaagcggttgctccacgtcccccgcgcacagcttctcgatacgttccagccgttccgagagccgctgcatccatccgtcgaaatattccttgtccagaaacatggcctattcctttggtcggtttttgcgccgcacggaacgctccttcagcacacggcggatttccgtgagggaataatacagcttccggttgatggccgaataggtgatcacgtgatccgagcggaggcgttgaagggtacgcccgctgatacccaggtaacggcagacctgctcaccgtccatccattcgtcgtttatatactccttattccatgcacgccccttttcagggagagaggcgattgcagcctctattttctctatacgcccgacaagctcgttataggctcgcgaaccgatcactatgattttcatactcctttgttttttagtctgttacaaaggtcgggcttatatggacagcttaaaacgaggtcggtacgacttttttttgataatttgcagtgaactgattctcaacggttcatgcggtgaagaaggcagtgttttttaccgaaatccgcggcccgtactcggtatttttatgggcagaaatgcgatagaatactgtgattcaacgcttaacggtgttctaatccggacggggctacaacggaacacccgtatcggctccttatacgggtgcaaatacgggcgttcgggaaagttcctttcgagagttacgggggaaaaccgacctcggttcttttgttatatacaacgctgattatcagtgtttctataaggaatagagtgctttaccggttcatattctactcggaattgccgtttttcttgtttcgcttccacgtctgcatacgtttaagcagggcctctttcgccttgtcaagccacggtgtcgggttgtttcggattttcatatcgcagaatgtcctcgaaaggttcatgtcgaggtgtacgttgaaagcgttggaaatgtagctggcaagttgcgtgagtggcacattgccgaaacagcctttactgtcgagcaggtaaataagttccgtcagatccgtcttcgagtcctgccatgtcggacgcacgtcagacaatggcagaaccatgttccggaggttcgtgctctccagtgattccaattcgcccataagataaaccgacaacatatcgttggccaggattttcgccaccttgaaatccgcgtttgtcgaaaactgcgggtcgagttcatagtagaaggtttccaggtattgctccgtgtcggtctgcccgcgcaggaaatagaggctgtccaggtgtgtggcgccgctgcggaaatagcggataaagtcgaggcgtttctgcgtgtacgcgttgatggcccgaacatgggcgtccaggtactcccgttgtgcctcgatacttcctaccggacggttcatctcgatattgtagagcttgcggtaatagatcagacggcaaaaaagacggggtttgatttctttgaagaactttatttcctcgtcatcgttttgaaaacggtagccgatgatatattgtttcaaacggtcgaacgcttctcccaggacacgtgacgcttcaagcgactttttcaacacgtcggtatcccgcgattcgatacgttcgatactccgcaggacttcgctgtttaatttttctataaatgcaatcataatccgtcttgttactttcgcgtataaagttagcgaatcgaaaaaccggcggattacgatttttatctttctcttcgtttttttatcacggagccgattttaatgtcaaatccggctttcctgacggatggaagtgggattgctccccatattccgcttgcaaaagtccgtaaagtgggattgggcggagaaaccgcacatgtaggctatttcctgcaacgtgtagtgtgtcgtccgcagcaactccccgatacgttcgatacggcgctgacgcaaccacgaggaggccgagcagccgaaaacccgctggaaacgccggcggaaggtaatcgtgctggaatacccgcaaaccccggcgagttccgtgacgttatccgaggcaagataattcgatttgacacgggagatgaactcgtaatcgtcccccaggtgcaacagctcctcgaactccccgacatcggcgggagtgagatgttcataagaggcgtcgagcattttcagcatgacagcagcgttacattcaacgggcatacccaatgtcttacgggcttcacgcaggtaattcttgaaccgcagccgcagcgtgtcgtgatgcgggtaggaacactcggacagaatggtgcagaccgtccgcagttcatcgacacaacagtagccgaaataccacgttacaagacgctcgacgtaatggacggcatgaaactcctccgaaagcatcagaagaagcaggaacggggtgaaatcctggtattccctcgttatgggacggggtgcttcgtcaagcaaggaggcgatgtcccgcatcagaagagaatctcccgagtacgcttttatttgttcggaactgcgggcataatcccggtaacgcgatatgaccgccgacaaagcattgaacttcacggcgtgaacgccttctataaaggaagggcgaagactgttgtaaatggataagtcggtttgcataagtcatttctataaaacggagccgcatccccttgttgccaaaactccgcaagtcgttacttatgaaccgcttggaacacggtacgaatcctaattacaaatatatcgcatctgataatccggaacaaatatcagcaggtaaaaatgaaaataaacctcgttatttttgattattacctgcaataatattatatttgcaaacaaataagagttgtttgacagcatgagaaatatagtgtatcaaagcactttaccaatttcttatccgttgcctattctcatgcgagtttcttttaatctatttgtagtcaattaaataccttcagactacatcaaatattgaaaataaaaagtcgtttgtcaagtatttcagaagaaaagcagactattcatgcacggctgagataataaggggctatcagtaagcttcactaacttcttacccatagacttgtcgtttagttaggtttcaacaaacttactctattttcatgtggtatccaattttgttcagttaatgaaacaaaatacagggtattggcttatctaaagggcttgattcttcgcataaaaatactaattcatgcatgaaataagaaaatcttatttttcttctatgctttttgcgggaaaaactataacttcggagcgcttttgataacccgtggaattgttgttgtgacaggaattccttatagatactcaagaaaagatagaaaaacgcatgagaaaaattgtagttttatttgttgtggcattttgcctgctctccacaggaatgagagctcaacacacatttgtacataaacaatcatcgacctacgaatggccggaagactctctcgtattgaagaaactggaccagtggcgtgatttgaagttcggtgttatttttcactggggactttatgccgtgcctggtattgttgaatcgtgggctctgtgttccgaagacgtggactggatcagtcgttacggtcacaataactatcaagagtttaaggattggtattggaacggattgagtaagcagttcaatccgactgaattcgaacctgcccaatgggcggaagtgacgaaacaagccggtatgaaatacatgatttttacgactaaacatcatgacggcttttgtatgttcgatagtcaatacacggatttttccatatcccggtgtgcttttaaggagcatccgaaagcggatgttgccaagtatgtattcgaagccttcagaaaggaagggtttatgacaggcgcttatttttcaaaaccggactggcataatcaggactattggtgggattatttcgctacacctaatcggaatgtgaattacaagatagaacgtcatcctgagaaatgggaagcttttaaaacatatacacataaccagattggtgaactgatgagcaattatggaacgattgatatcctatggttggatggcgggtgggtttctcctcgtaacaatcaggatatcgatatgccgcagattgctgctatggcgcgtgcaaaacaacccggccttttggtggtagaccgcactattcatggtaaatatgagaactatcagacaccggaacaaaaaattcctgagcatcagcttccctatccatgggaaagttgtgtgacgttgactacggattggggctgggtaaagaatccggtttataaaacacctaaccggattatctccattctgatggaagtggttgccaaaggcggaaatttacttcttggagtaggacctactgccgaaggccttatcgaacaacctactgtaaaacgtttgcaggagattggacgctggatgcagaaaaatgggaaggctatttaccatacccggatcacccccaattaccattgtgggaatgtttggttcactgccgataagaatggcagaaccctttatgcgttatacgctttgcctgaaggagaaacgctgcctgctgtcattgagtgggaggggaatgttcctgagcgtggtacaagtgtcagactgttgtccacaggacaacgtatgaaatggatagaaagagatgggaaagtggcagtgacattacctgctaaattggcaggtagcaccgagcctattgctcttcagttcgatacttctttgccgaaacaaaacaagaagtgataataaaaaagccacccatttaggtggcttcttttttgctcttcctcttggacttgaaccaaggaccctctgattaacagtcagatgctctaaccgactgagctaaggaagaatgtttgcaactaagatttctaactttgctcttcctcttggacttgaaccaaggaccctctgattaacagtcagatgctctaaccgactgagctaaggaagaatgtttttctcaattgcgatgcaaaagtagtaggtttttttgaaatatgcaatatctttgcaaaaaaaatatttgaaatggacaaaataataggattgggcaacgccctggtagacgtacttgcaaccctagaggatgatacgctcctggaggaaatgggattacccaaaggaagcatgcaactgattgatgacgctaagttacagcagattaacacgagattttcacaaatgaaaacccaccaggcaacgggtggatcggcaggaaatgccatacttgggctggcttgtcttggtgccggaacaggatttataggaaaaataggaaatgatcattttggggatttttttcgtaataatcttcagaaaaatgatattgaggataaattattgatttcggaacaacttccttccggtgttgcatctacttttatttcaccggatggagaacgtacttttggtacttatttgggagcggctgcttctttaagggcagaagaactgactcttgatatgtttaaagggtatgcttacttatttatagaaggttatctggtacaagaccatgaaatgattcttcatgccattgaactggcaaaagaagcaggattgcagatttgtctcgatatggcaagttataatattgtagctagtgatatggagtttttctccttattaataaataaatacgtggacattgtctttgcgaacgaagaagaagcgaaggctttcacgggtaaggagccgaaagaggctttaggagtgattgccaaaaaatgcagtattgctatcgtaaaagttggtgcggaaggttcttatattcgtaaaggaacggaagaaattaaggtttctgctatcccggtagagaaggtcgtggatactaccggtgcgggggactattttgcttccggttttctatatggattgacatgtggatattcgttggagaagtgtgctaaaataggttctattctatcgggaaatgttattcaggtaatcggaacatccatgccgcaagaacgttgggatgaaattaagttaaatattaacaggattctggcggaataaccagggattgagttacttttacaactcatttatattgaaagaagtatgaaaaaattgctgagtgggcggatagctattgttgtagtagccgtgatagctacggtagctttctttagtttcaagagtggagacgaccgcaatttccagattgccaagaatttggatatattcaatgcgattgtgaaagagctggatatgttctatgtagatacaattgacccgaacaagaccattcgggaagggattgacaatatgcttttcacgctggatccttatacggagtattttccggaagaagaccagagtgaactggaacagatgattaaaggctcattcggtggtatcggttcttacattgcttataatacaaagctcaaacgttcgatgatttccgaacctttcgaaggtacacctgccgcgaaagccggattgaaagccggagatattctaatggaaatcgatggcaaggatcttgcgggtaagaacaatgcggaagtcagccagatgttgcgcggacaggctggaaccagctttaaattgaaagtgaaccgtcccaatgcgaagggagggaatacaccgatggaatttacgattgtacgtgaatctattcaaaatccggcgattccttatgctgctgtgctggataatcaggtaggatatattaatttgagtactttttccggtaatccttctaaggagtttaagaaggcgtttctggatttaaagaaacaaggggctacttcgttggtaattgaccttcgcgggaatggcggcggcttgttggatgaggcggtggaaattgctaactatttcttgccacgtggaaaagtgattgtaacaacaaaaggtaaaattaagcaggcgagcaatacttataagactttacgtgaaccgttggatttggatattccgattgctgtattggtaaatagtggcacagcttctgcttctgagattctgtcgggttctttgcaggaccttgaccgtgctgtagttgtcggcagtcgtacttttggcaaaggactggtacaggtgccccgttctctgccttatggaggaacgatgaaagtgactacttccaaatattatattccaagcggacgctgtgtgcaagctattgactataaacaccggaatgaagacggaagtgtaggtactattcctgatagtttgacgaaagtgttctatacggctgccggacgtgaagtgcgcgacggaggcggggtgatgccggatgttgctatcaaacaggaaaagttgccgaatatcctgttttatttggttcgggataatctgatattcgattatgcaactcagtactgcctgaaacatcctactatcgtagagcctgaaaagttcgaggttacggacgctgattataatgactttaagacattggtgaagaaggctgatttcaaatatgaccagcaaagtgagaaaattctgaaaactttgaaggaggctgccgaatttgaaggttatatggagggtgcttcggaagagttcaaggcactcgagaagaagttgaaccatgaccttgagcgcgatttagattatttctccggtgatataaagaagatgatagcttctgaaattataaagcgctattattatcagcgtggtaatatcattcagcagttgaaggatgatgacggcttgaaggaagctgtgaagattctgaatgatccggcgaaatacaaggaaatgctaagtgcgccggttgccaagaaatagggtatacgtgtgataataaataaacgacggggtgtatggtaaatgcaaatactcgtcgttttttttgtttctgataatccggctatttttattcggttgttcttattgacgaatcagaggcagggtgaagtagaatctgcttccttttccttcttgggaacgcagccatatacgtcctcccattttctctactagcattctgcaaagagttaatccgagtccggtaccttgtacaaagtcgtttattttaccgaatcgttggaagatagtagctactctttctgccgggataccgataccactatctttgacataaaattccacgaaatcttccttctcccgatagccgaaatgaatttctccttttggggtgaatttggcagcattactaagcaagttacttataatctgtatgatacggttccagtctccggatacataaagctcggtatctacatcgtccagaatcagtttagtaccgtttttgactttataacagaattgctgttccagttgcaggcagatatctattaatttgatagggcggatattgaaactcaatgaatcggcttcgagtgatgacaaatccagaatatcattgaacagattcagtaatatttccgaatttctctcgatgatttcagcatactgttccttctcgtttgtgcattcagcgtcgatgactaatttggaaaatccgacgatggcgttcaggggggtacggatctcatgactcatgttggcaagaaaagcagatttcaggcggtccgattcttcggctttgattctggcggcctccagctctttttgttgtttcttgttggtttgttccgcattccattgttcggatatatcgcgacacatacatagcaggtattcgttatccagagggaaaatacgattttcgtaatggtgtaagataccgtccagcatcagatcatgtcgggatgttgagctttctcctgtaaggattaccctgtccatattttggcgtacgctttcgtaggcttccggcgggagtatgtcttttacgttagaatgggtgatattatcggcattgataccttccacatgattggtcgacggagaggaggcgagttcaataatgtttgcatcgtggtcgaaaactgtcaacatatcgggcagggcgtccagaatacgggtactgtatttttcacggaaacgttcttgtacggggtatgactgcatagaagaaagatcttcgactttcttctctaattgttctataattttaatcagctcttcttttgtcttgttctcgttgttttgcatagaaggttcaataaatctgttatcaatgttgtataaagtgcattaatactgcaaatataagacaataatccgacaaacgtgccaggcttcctagttattataatataaaaaaggaggatagcttttgccctactaatcagaatgttctatctttgcaccacttatttataaatgatttacaatatgtctacagaattattctctactctgccctacaaggtggcagatattacgcttgctgacttcggacgcaaggaaatcgatttggcagaaaaagaaatgcccggcctcatggctcttcgcgaaaagtatggagaatccaaaccgttgaaaggtgcccgtattatgggatcgttgcacatgaccattcagacagccgttctgattgaaacattggttgctttaggtgctgaagtacgttggtgttcttgtaatatatattcgacacaagaccatgctgcggcagcgatcgctgcttcgggggtgcctgtgtttgcatggaagggtgaaacgcttgccgactactggtggtgtacgttgcaggctttgagtttccccggtggtaaaggaccgaatgtgattgtagatgatggtggtgatgcaaccatgatgattcacgttggttatgatgctgaaaacaatgctgccgtgctggataaggaagtgcacgcagaagatgaaatagagctgaatgctatcttgaagaaagtgttggcggaagatgctacccgttggcatcgcgtagcggaagaagttcgtggcgtatctgaagagacaaccacaggtgtacaccgtctgtaccagatgcaggaagaaggcaaactgttattcccggcattcaatgtgaacgattcggtaacgaagtccaaattcgataatctgtacggatgtcgtgaatcattagctgacggtatcaagcgtgcaacggatgtgatgattgccggtaaggtagtagttgtgtgtggctatggtgatgtcggtaaaggatgttcacattccatgcgctcttacggggcacgtgtgcttgtgacggaagtagacccgatctgtgcattgcaagcggcaatggaaggctttgaagtagtgacaatggaggatgcgtgcactgaaggcaatattttcgtgactactactggcaatatcgatattatccgtattgaccacatggagaagatgaaagaccaggctatcgtatgtaatatcggtcacttcgacaatgaaattcaggtggatgcgttgaaacattatgcgggtatcaaatgcgtgaatataaaaccgcaggtagaccgttattatttcccggatggccatagcattatactgcttgccgacggccgtttggtaaatctggggtgtgcgacaggacatccgtcattcgtgatgagtaactcgtttactaatcagacattggctcagatcgaactgttcaataaaaaatatgatataaatgtatatcgtttgccgaaacatctggatgaggaagtagcccgtctgcatcttgaaaaaatcggggtgaaactgactaagctgactcctgaacaggctgcttatatcggtgtatcggtagacggcccttacaaggcggatcattatagatactaaattcagttgataattgatagttgataaatgatagttgttggcttgggggctgaatgcaacaagtcagttatcattctcaactatcaattatcatttatcaactatcaatatattatgaagaaaatccttccagacttaattgccattctggcttttatcattctttcttttgcttatttctttccggctgatatcgaaggtcgtattctgtttcagcacgattcggtggccggagttggtgcagggcaagaatccaaggaatatctcgaacgtaccggagaacgtacacgctggacaaactctatttttggcggtatgcctacctatcagatgtctccgagctacgattcaacaaagactttgaagtgggtggaaaaggtgtatcagttataccttcccggctatgtcgtactgactttcattatgatgctgggcttttatatccttctgcgagcattcggattatcagcatggctggcaggactaggggggattatatgggcattctcttcctatttctttattctgataccggcggggcatatctggaagtttgttacattggcttatattccgcctacgattgccggtgtcgtattggcttatcggaagaaatatttgttaggaggggttattacagccttgtttattgctcttcagattcagtcgaatcacattcagatgagttattacttcatgtttgtgatcctgttctttataatagcttattttgttgatgcttatgaaaagaaggaattgccgcatttctttaaggctagcgctattcttgcattagctgctgtggtaggagtttgcgtaaatatctccaacttgtaccatacttacgagtatagtaaggagaccatgcgcggtaagagcgaactgaaacaggaaggccctgctgccaaccagaccagtagcggactggaccgcgattatattacaaattggagctatggcataggtgaaacactgactctattagtgcccaacgttaagggagggggctgttctactactttgtcacagaatgaaactgctatggcaaaagcaaacccgatgtacggaaacctttattcgcagttgacgccctattttggcgatcagccgtggactgccgggccggtatatgtcggagcgtttgttgtgttcctgtttattttgggatgttttattgttaaaggcccgctcaaatgggcactgttgggagccaccattttttctatccttctttcgtggggaaagaacttcatggggctgactgatttcttcatcgattatattccgatgtataataaattccgtgcggtatcctccattcttgtaatagccgaatttacaattccgttgttggcgatttttgctttgaaagagattctgagcaaaccggatatcctgaagctgaaagagaaccgtacaggagtaattgtcacgttggtgcttacagccggtgttgcgttgattctggctgttgctccgggagttttcttctccaacttcagttcaggacaggaaatggctgctttgaagcaagggcttccggcggaacatcttgttcctgtcatgaccagcctgaaagatatgcgtgaggcgatactaacttcggatgcatggcgtagcttttttatcatcgttataggttgcctgcttttattcttatatcaacagaagaagttgaaagcctcattcaccttaggaggtattgtacttctgtgtctgatagatatgtggagtgtcaacaaacgctatttgtatgatgatctgtttgttccgaagtccaaacaagcggaagcattcgtcaagacgcaggcggatgaaattattcttcaagatacgaccttatattatcgggtattgaactttgtaggtttccccggcaatacatttaatgagaataatacagcgtactggcataagagtgtcggtggttatcatgccgccaagttgcgccgttatcaggaaatgatcgatcatcatattactccggaaatgcaggcgacctatcaggaagtagctgctgccggtggcaaaatggacagcgtggatgcttctaaatttcgtgtactgaatatgctgaacacgaaatactttatcttccctgccggacaacaggggcagcctgttcctgtggaaaatccgtatgcatacggtaatgcctggtttgtggataaggtgcagtatgtgaataatgcaaatgaggaaattgatgctttgaatgatattcttcctacggaaatcgctgtagtagatgcgaagtttaaggaaaaactgaagggtgtgacggaaggatataaggactctctgtctgccattcgtttgacgagctatgagccgaatcgtttggtttataagacttcttccgctaaagacggtgtagttgttttctctgaaatatattatccgggatggcaggctacgattgacggtcagccggtggatattgcccgggcggactatgtgttgcgtgtaatgaatattccggccggtgaacatacgattgagatgtggtttgatccgcagagcatacatgtgacggaaagtattgcttacgcagcattggctttgctgttgattggagtgatgattctggtatggatgagtagaagcagaatctctaagaaatcttgaatgaaatgatgtaatgcttaccttattgcatagaatagataaggttattagataagaacggctctcttcctcccgaagagagccgttttgcattcactaaaaaattatgaaaaacaaacgctatttggttgtttgaatatgctgattaatcattctttatttgttttaatacctcaaaactaagcagatactgggatagatgaaaataaaatcgactaagtacggagttttgtctatcaaaagttctgttgaaaaaggaaaatatgaatataaagagtcggtttatgggtagctttcatttgtcctaacccactaaatttgtagccgattatagagcatatattatgaaaagactactgttcatttttaccttttttattttgctcgttgtaaacgggagagcgcaaggagtagaaaccttgacattggaagattgccttcggataggtattgataacaacttgtcgttggagagcaagcgtagagaaatacagaaaagcaaatatggtgtatctgaaaatcgggcaagattgttgccgcagattagtgctgtcgccggttatagtaataattttgatcctccggtatctgtgacggacggttcatcttacggcgttccctataatattactcaaacattgcaacattctgctaatgcaggcctggaaatgcaaatgccgcttttcaaccagactctttatacttctatgtctattgctaaagttgtggaggagatcagccgcttgtcttatggtaaggcgagggaggacattattcttcaaatcagcaagatgtactatctggggcaagtaacagccgagcaaatagtgttgataaaggcgaatatcacccgtctggaagagttgcgggatataacccgggctttctttgataatggtatgtctatggaagtcgacctgaaaagagtaaatatcaatttggagaacctgaaagtgcaatatgacaatgcacaggcaatgatgaagcagcaacttaatatgttgaagtacattatggattatccggctgaaaaagaaatagccctgacaccggttaatactgatagcattactacggtcgctttaaccggtttgtcggagaacctctacgaactgcaactcacgcaatcgcagttggaactggctgaacggcaaaaacggatgattactaatggctatatcccttctcttagtttgacagggaactggagatatgctgcctacacagataaaggttatcattggttccattccggtccgtccaatcattggtttcgttcgtatggactggggctgactttgcgcattcctatttttgatggactggataaaacctataagataaggaaagcgatgatcgacattgagaatcgcaagctggcatgggaggacacccggaaaaatctgcaaacccaatatttgaatgcggtgaacgacctgatgaataaccagcgtaattttaaaaaacagaaagataactatctgttggcggaagatgtctatgccgttacttccgaccgttatcgcgaagggatcgcttcaatgactgaggtgctgcaagacgaaatgcagatgagtgaagcgcagaacaattatatcaatgcacattataattatcgggtcaccaatctgatgctcctcaaactgaccgggcagatagaatcattagtcaaataatacgcaactaacaatcgaatcataaaatatggaaacaatggaaaataatattccttccgctactcatcaggagaaagcgaagaaaatgaagaaacttcgtcgttggcagattgcagtcagccttttaggagtggctattattgtctggggagtaattgaagtggtttgtctctttttgaattatagccagacggaaaccagcaacgatgcccagatcgagcaatatgtatcgcctatcaacctgcgtgcttcgggatatattgataagatttactttaccgagcatcaggaggtacataaaggggatactctgatggtgctcgacgatcgtgaatataaaatccgggtaatggaagccgaagccgcactgaaggatgcgcaagccggtgccacaataattaatgccacgttgaatactacacagaccactgcatccgtctatgatgcctctattgctgaaatcgaagtgcgcctggctaaactggagaaagaccggaaacgatatgaaaatctggtgaaacgaaatgcagcgactcctatccagcttgaacagattattacggattatgaggctacgcgtaagaagctggaagctgtggaaagacagaagaaagctgccctttccggtgtggatgaggtgtcttatcgtcgtgtgagtaccgaagctgctattcagcgggcaacggcggcacttgaaatggcacgcctgaatttgtcttatacggttgtggtagctccctgtgatggaaagctcggccgtcgttcgttggaggaaggacaattcatttccgccggacaaacgattacttatattcttcctaatactcaaaaatggattgtagccaattataaggaaacgcaaattgagaatctgcatatcggacaggaagtatctgttacggtagacgctattagtgataaagagtttacggggaaggtgacatctatttcaggggccacaggttctaaatactcattagtcccgacagataattcggccggaaactttgtaaagatacaacagcgtatccctgtacgtattgattttactaatttatccaaagaagataacgaacgactggcagctggtatgatggtcgtggttaaagcccggctttagtttcattctgccttgtccgtgaagtgtgattaactatttgtaaacagtaatttggatttacacaaatgccctcatatcctaaaaactatcctttttataactggatgcccaagccattggggattatcatcctattattctttttcctgccgattcttacggtaggcggggtttattcggtgaatagtaccgagatgatgagcggtcttggcattatttccgaacatattcagtttgctaactttgtgacttcgatcggtatggcggcttttgctccattcttgtacgaactggtgtgtgtgcgccgggagaagatgatgtgcattgtcggattcgcattgatgtatatattcagttatatttgtgccaagaccgatagcgtattcctgttagcactttgtagtctgttgacaggctttctgcgtatggtgttgatgatggtcaatctgtttacccttatttggtatgccggaggcatggaagctacccgtaatatcactccggggctggaaccgaaagacgcagccggttggaacaaactggatattgaaagatgtgtgagccagccggcggtttatctgttttttatgattctgggacagtcgggtacggcactcacggcctggctgtcctttgaatatgagtggaagtatgtgtattattttatgatggggattctactggtttctatcttaatcatatttatcactatgcccaattacaaattccctgggcgctttcctatcaacttccgtaagttcggtaatgtcactgccttctgtgtttcgctgacgtgtctcacttatgtactggtttacggtaaagtgctcgattggtacgatgatgagtctatccgttgggcaactgctgtcagcatactttttgccgggatctttctctatatggatgtcacccgccggtcgccttatgtcttgttggatgcattcaaactacgcaccatccgtatgggcgctttgctttatctgctgctgatgatcatcaattccagtgccatgtttgttaatgtattcgcaggtgtagggatgcatcttgataatttgcagaatgcttcgttgggcaattggtgcatggtggggtatactattggtgcagtgattgctatggcgttggggagcaaaggattgcatttcaaatatctttttgctcttggatttttctttctgtccttatcggctgtgttcatgtattttgaagtacagacagcagggatgtatgaacgtttgaagtatgcagtcattatccgtgctattggtatgatgattttgtatgccctgacggcagcttatgctaatcagcgtatgcctttcaaatacctttctacctggatttgcatcatgctcaccgtgcgtatggtgctgggacccggtattggaggagctatttattcgaatgtgctgcaggaacggcagcaatattacatcacccgttatgcgcaaaatgtagatttgctaaatccggatgcttctacttcttttcttggtacggtgcaggggatgaagtatcaagggaaaagtgagacggaagcccgtaatatggcagctatatctactaagggacggattcaggtgcaagccacgctttccgccctcaaagaaatggcaggctggacgatctatggcgggttaatttgtatgatatttgtgcttgttgttccttatcctaaacgaaaattgctaacttagcgtcgtttttgataatgatttatataatgtattggtattatggatacacagcaagatcgtttattgcaatttgaccgcgacttgttgagcgggaaaaatatatgtagttcgagaggtgtacttgtgacttttccgtcttctttaaaaaaactgttccacatgaaaggattgggggtgattatttgtcaccgggggagtttccagttttccttgaatcagaaggtctgttctgctaaggcgggcgaaagcctgtttattcccgaagaaggtgcgtttcaggttcttcaggaatcagaagatatggaagtacagattctgatctatcagatagagcccatacgggatattatgggcaatgcggttgtgactatgtatatgtattcgcggattactcctgatgagcctagttgtgtgtggaccaccggtgaagaagaagaaatcacgaaatatatgtctctgctcgacagtgctgtggaggtagaagaaaatccatttaaactttacgaacaaaaactacttctacttgcattaacatacaggatttgttccatgtataatcgtaaattagtgaatgatggagaagaagcgggaggacggaaaaatgaagtcttcatccgtttaatccagttaattgagaaatattatatgcaggagcggggagtggaattttatgcggataaactctgtttgtctcctaaatatctttctgcggtttcaaaaagtatatgcgggtatacagtacaggaacttgtattcaaggcgattatccgtaaaagtatctcgttgctgaagaatactcagcaggacattcaggaaatctcgaatgctttcggcttccccaatgcttcttatttcggtacattctttaagaagcaagtggggatgtcaccgcagcaatatcgaaagagtctttaaagatttattctttttctccgtaggcaagatcgccagcgtcgcccagccccggaacgatataggagtgttcattgatttcggggtcgatagcagcacaccagatcgttgtcttatcttcggggaatacatttataatatgatcgatagccttctggctggcgatgatggaagcaacgtggatttcggcagggtgacctttggtcagcattgcctgatagctcagttccatactgccgcctgttgccaacatagggtcggtgatgatcagcgttttgtcgtcaatacggggagaagcgatatattctatatgtatatcaaattttagcgtatccttatacttacggtatgcggaaacaaacgcattctccgcaccatcgaaataactcaagaagccctgatggaagggtaggcctgcacgtaagatagtgctgataactaaattgttgtccggtgtacttaccggagcaactcccagtggtgtccggatgttttttaccgaatatgtaaactccttactcatttcatacgccatgatttctccgatacgttcaatgttacggcggaagcgaaggcggtcgttctgaacttctacatttctgatctcggatatgtactggtttagaatcgaatttgttttgctaaaatcaattactttcatattatagtttaatcataatttaatctcattttcatagtattgatagcatactgacttgcaaagtaaatgataatctttcaaattgcaatattcagtttgcagatattgttaggaatttataaaagagattcaattagggaaaaatttctctaatcccttcttgctttccaaagaaagtgttacttttgtacccggatttacaagggggcgttcctcaatccccttcttagtcaaaaggtgaagagataataaaacaaaataccaatttaattaattcaaagaaaatggcaaatttagatttaagcaagtacggtatcacaggtgtgaccgagattttgcacaacccgtcttatgatgttttgttcgctgaagaaacaaaaccgagtctggaaggctttgaaaaaggtcaagtaactgaattaggtgctgttaatgtaatgacaggtatctataccggtcgttctcctaaagataaattcttcgttaagaatgaagcttctgctgattctgtatggtggacttctgacgaatacaaaaacgacaacaaaccttgtactgaagaagcttgggctgatttgaaagctaaagctgtaaaacaattgtcaggcaaacgtctgttcgttgttgatactttctgtggtgctaacgaagcaactcgtatgaaagtacgtttcatcatggaagtagcttggcaggctcacttcgtaactaacatgttcatccgtccgactgctgaagaacttgctaattacggagaacctgatttcgtatgtttcaatgcttctaaagctaaagttgacaactataaagaactgggcttgaactctgaaactgctacagtgtttaacctgaagactaaagaacaagttatcctgaatacttggtacggtggtgaaatgaagaaaggtatgttctctattatgaactacatgaacccgcttcgtggtatcgcttctatgcactgctctgctaacacggatatggaaggaactagctctgctatcttcttcggtctgtcaggtacaggtaagactactttgtctactgacccgaaacgtaagttgatcggtgacgacgaacacggctgggataacgaaggtgtatttaactacgaaggtggttgctatgctaaggttatcaacttggataaagacagcgaaccggatatctataacgctatcaaacgtgacgctttgcttgaaaacgtaacagttgacgctaacggtaagatcgacttcactgataagagcgtaacagaaaacactcgtgtttcttatcctatctatcacatcgaaaacattgttaagcctgtttctaaaggtcctcacgctaaacaagttatcttcttgtctgctgacgcattcggtgtattgcctccggtatctatcctgaacccggaacaagctcagtattacttcctgtctggatttacagctaaattggctggtacagaacgtggtatcactgaaccgactccgacattctctgcttgcttcggtgctgctttcttgtcattgcacccgactaaatatgcagaagaactggttaagaagatggaaatgactggtgctaaggcatacttggttaacactggttggaatggttctggcaaacgtatctctatcaaagatactcgtggtattatcgatgcgatccttgacggttctatcgacaaagctcctactaaggttattccttacttcgactttgttgttccgacagaacttccgggtgttgatccgaatatccttgacccgcgcgacacttacgaatgtgcttgcaaatgggaagaaaaagcaaaagacttggcaggacgtttcatcaagaacttcgctaagtttacaggtaacgaagctggtaaggctttggttgctgctggtccgaaactctaatttatatattagatatattgagaaaggcggttccgaaaggagccgcctttttgtttcataagtttcataaaaatatgaattctattttgtaatttgatataataaagatatatttgttatgccttataaatatctaaaagaaaaataaatgaacctgcgcgataacagtattgatctcgtctctttcaataaactatttacggagtatcatgaacgctttgtccgtttcgcttatacttatgtggataactatatggaggctgaggatattgtgatggaagccatgacttattactgggaaaacaggacccgtttgtttggagtgaatcctcctgcttatatttttactacaattaaaaataagtgcctgaattatcttcgcgaccgtcagtattatcagactgtatcagagcaattacaagagcatgcagcatggaagcttgcgatacagatatctactctggaagcatgcaacccggaggaacttttttctaaagaaatgaagcagttggtggagcatgcgttaagtaaattgccggaaaaaacaagaagagtctttattatgcggcgctttgaagaaaagagttatcgtgagattgcttcagagatgaatatgtccgtcaagggagttgaataccatatgaataaggcgacagaatctttaaaaaaaacattgaaagacttcctgcctcttttgatttatcttatctatcattaatttttcacatctattaactagggattctttttcgttgtgtgctttactataaaaggcaatggtataatgtgtcattttatataagttgacgatgaatttggacagagaacttttatttcgttttttcaataaagaaacgacgcttgaggaagaaaagaaaattcgtctttggatagatgaatgcgacgaacatcgttgcgagtttttccgtgaacgtcaactttttgatgctattttgcttcacggggatccgtcttacgaaaagagccgcccccgattctatattccatggcataaagtggtggctactctttccggtattgcagcgattgtgatacttactatcattacgactacatatttcttgcaacaatcttttagagacgaagtgatgaatacagttactgtcccccagggacagcgtgttcacttgacattgtctgatggaacaaaggtttggttgaatgctaaaaccaaaatggagtatccgcaaagctttaaagtgtccgatcaaagaatagtaaaagtggacggcgaagcctattttgaagtgagtaagaataaagagaaaccatttattgttaaaacgactaagggtgatgtagaagtattaggaactaagttttacataagcgcttatgcgacaacagatgtttttgaaacttctttgatagaaggtaaagtgaaggtgcatactgcttatgaagatatgacactctatcccaaagataaggctgtattggaaaacggtcttctcactcgtaagcagattgatgatatggatacttaccgttggcgtgacgggctttattgttttaagaacctatcttttgatgatgttctgaaacaatttgagatctattatgatatccgttttgtgaaagagaatccacaaattgcaaacccaaaactgaatggaaagttcaggctgattgacggagtagattacgcattacgggtacttcaaagagaggtcggtttctcgttccggagggatgatgaagctaatgtgatttatctgaaataatttgtccaactataaaatgaatgcctatgtaaataaatagaagaagtctgaaaacgaaatcggcaagtactaccaatacctgccgatcgtgagataaattttctcacccgagagtgaaaaaacttttaataaaatctaatcgtaaaaatatgaaaaataaatcaatcggggacgattataagctaaaaaatccccatgttaacctattttatagagctatgcgaataactacattcttattgttcttctgttcgttctgtgctttagccgataatgtaaattctcagacggcgaaagttactattaaaagaagtaatgtgacacttctggatgtgctgaatgaaatagaaaatcaaactaattatctgtttatttattccaacgacattaatgtgaaacgtccggtttcgattaatgtgaatgcaaaggcggttaatagcgttttagctaagttgtttgctggaaaggacgttgcctatcaaatggagggaactcatattgttttgacaaaaacggaaaaatccttaaacgaggtaagtgtacagcaacaaagtaaaagaatggaaaacattaccggtgtggtgcttgacgaagcgggagaaccgataatcggtgcttctgtaaaagtacagaatacaactattggtaccattactgatctggaaggaaagtttaaattggagcttccggcaaaatctgtcattgaaatatcgtttatcggatatcggacgaaaacggttgttgtcggtaaggagaaacatattagtatctatatggaagaagatactaaagcgttggacgaagtgattgttgtggggtatggcacgacttccaagcgcaagactactgccgctattgctagtgtgaatgctgaagatatagctaaagtacctacggctaatataacacagagccttgccggccgtgctccgggattgatcgtgaatacatccggaggtggtattaataactattcttctatatccattcgtggtggtgctactccattgtttgttatcgatgatgttatctgtgaagaacgtgatttccggaatttaaatcctgaagatgtggaacagatgtctgtgctgaaagatgcggcttctactgccgtatatggtgcacgtgctgcaaatggcattatcatggtggtaactaagcagggtaaagctggtaaaatgagtatcaattatagtttcaactacaatttgagtcaacctacaattatgcctgataaattgaattcgtatgatgccgcttattatctgaaccaggggttggcaaatgacggtatgaaagaacgttttaatgcggaagaaatggaactttttgcgaacggttctgatcctcatcattaccctaacgtggactggcagaagttggctatgaatacatttgctcctgaacaacgtcatacactgactgtgaccggtggtagtgaaaaagtaaaagcatatacatcattctcatattatgaccagcagtctatctataagaataataccaataatctccaacgctataattaccgtaccaacctgattgcagattttaaggaagtaggcgttaaagtaacttcaggaattgaaggatatctgacaaaaagccgggagccgttgagtactacgggaggtgattatggtagtgtctggagtcatatccagaataaattgccttgggaaaatgcgtataaccaatatgggcaattgaataatatcccggataacccgttggcggagatttctccggaagcgggatatagcaagggagagattgctacggttaaggccaatatgggattggaatggacggtaccttgggtagcaggactaagattgaaagcgttaggaaattatcgtctgacagccgaccgtcagaaggattggaagaaatctccggttatgtatgattgggacggaaatccgaatactccaagcaagccgtctttagaaaagaattattggaatatgtcagagtacaccgtacaagcttttgcaaattacgaccgtacttttaatgttgtgcatactgttagtgctacggccggtattgaggcaaataaatatatgtatgataatgcaactctgggacgcaaagaatacttgttggatgtagatcagatcaatccggggcctgttgctacggctacaaactcctctgctgaggggacacgtgcacgtgccggtctagtggctcatttaaagtatgattatgcaagtaaatatgtggtagaaggtagtatgcgttatgacggcagtgacaatttcccgaaaggaaaacgttggggagtcttttatgcaggttcggcggcatgggtaatctctgaagaatcgttctggaaaaatttgaaagatcgccatattcttgatctgtttaagattagggcttcttatggagagattggtctggatgatatttctgcttattcatacttacagtcttataatttggatgaacgcggatatttgttaggaggtaaattttatccgggtttttctgaaggtaacttggttagcaaagatatttcttggtatacaactcgcagtacaaatgtcggattagactttgcttctttagataatcgcttgtccggttctgtcgaatatttccgtatgtctacaaaaggatatctgacttctccttctaatgtggcatatactgatccgttaggaacctcattgccacaagtaaagtctgacggtgaaagtattcgtcaaggaggtgaattcattgtacagtggaaagaaaagagaggtgattttgaatatgcgataggtgctaattttacctattttgattcattctggatgaataatccgtacgaagcagaaacagacttgaagaatccttataaacgtactactcatgccaaaggatattggggaatcggatatgaatctttgggatattatcaaagtcaggaagatgtgatgaactcgcccaaacggcaaaactcggtaaacttgggtgctggtgatattaaatattatgatttcaatggagatggtataattgacggaaatgaccaacatcgtatcggtaaaaattcttctcctcgcggacagtatggtataagtatagatcttaattataagggctggttcatgaatatgttgtggcaaggagctacgtccaaagatttctattttggagacaagctgcaaggtcaaggttccgattatggctatttgtcagtgatttatgatttccagagagacgtttggacaccggataatcggaatgccaagttccctcgtctacggagtacttctaaatataatggaagcaacaattatggttcatctgatttctggttggttaatactggctatatccgtctgaagagtttgaatatcggttatgatctgaaacataaagtattgaagagagttccatggatcacgaaatgtgatgtctctctgagtggatataacttgttgactttcagcgaatcgaataaatacgatattgatccggagattggaaatactaatttatatacttatcctgtcagcagggtatattcgattagttttaacattggattctaataactttaaaaacacagaatatgaaaataatgaaatatatagttcctgcacttttaggagggatgttaacactgcaaagttgtgaacattttttagatacgaaacctacggaaacttattcggaagaattggtttgggggagtcggtctactgccgatgcattcgtactacgcacatatcctgatattttgggattataccacgatttttggggagacgatcagataacactaaatacaattctacgccaaagttgtccgggagaggcacgtgacctgataaatcgggaacatgatttcggttttaataaatttagtattatccgtcggtgtaacttgattattgaacaggcttccgcctctactgctttatccgatttggataaaaaagaactggttgccgagggaaaaatgcttcgggctatgatctactattatcaggcgaaacattgtggacgtgtgatttgggtagacagggtattgcaagtagacgatgaatttaatttgcccctcactgaatctattgaccggacgtatgatttgatattgagtgatttggatgatgccatagcaggacttccggaggaatatcctgccgggcgtgccaatgctaatgcggcccgggctttgaagtcggaagtctgtctgacggctgctgcttacactacggatgctacacgaaagaagacattatgggaacaagcggtagtagcggtagatgctatccaaggttattctttggacgccaattatggtggcatgttcaatcaggagaactcttattcttcaacggagattattttagccagatatttcagtaaagaaaatacaaatggcggtgatacttatatgcagactgtcattcctaatcagggaaatgataatctaaaaaagttgggacgtggtcctttgtttaaaaaagactgggtctttgagtgctggctggaacattcgccttcccagaatttggtagatgattatctggttattgaccaactgacaaatgaagctaaaaagtggaatacgacttcccagtttgtgaataataccaatgtcatttctaatgatgctgtaagagatctggctgtgaatgctgatgaattggatgaacactctctggcttatgaaacgaaagataaagggcgtgatacccgtattaatgattttatgtatacgcatcgcgacaaacgtttttatgcgacaatcgtacaggactcctgtgaatattatggggaattagtcacaatgcataagaccggtaacttgcaacgttgtagtttgggtgaggctccgggaaccgctgaaatggggtctaccaattacttgtggcgcaaaggtgtctacattaatgactggcgtatatttgttgatgtgcctacggattatcattatgtaattttccggtacggacgtgcgctgttgaataaggctgaagcccttctttgtctggcaaagagtgacccttcaaaactgtcagaagcagtagctactttcaatcagactcgcactgtacatggtggtttgccggaatccgaagcatccacgttggttgaggcatggaaagattataaaattgagcgtcatgtagaattgccaatggaaggcgactattattggtctttgttgcgttggggcaaatatggtgaagaagcaaacgacggacaaccctccggaagtgaagtcatcaaagaattgcgtactccggctacatttattgaaattagcagtgaccgtcatcgtatgtttatcggtacacaaggatatggaaatgccgaccgtactttttctaagaaacgctatttgtatcctattccgcaaagtttgattaatgcaaactctgctataacagagaaggaccaaaatcctctgtggtaaaatgataaccaatattcgaattattaatcaatgaaacaagaacaatgaatagaattaaattatcagacataaaatggttgcttgtactgttgtgcctgccatttgtttcctcatgtaaagatgatcttgaggcttatgaagaagcggaaattacctcagtcggtgcatatcaccgctactatacaacagagaaggatgctttgacaggtgagtttaaggtggcggagaaggaattggagaagtccaatagtatcaacgaagacgaagcggttgttactgcgactttcacggttcctgctgccagtggcagttttactgatgctgaacgtgcaaaagtgtcgttgaataagttggttgtatacttcaatgtgtctactgctgcacgcgtgacaccactggatggctccccgaagttaggggctccgggcgattggacctcagaacgtagatatagtgtcatggctgcaaatggaacaaagaaaacatggactgtcaaagttgtgttgaataaataggtattattttcttatatttgtagcaaataaactgaaatcaaacaattgaggtcttgggagtcgttgaggtggtgattaagcacgttatgtcaacgactcctttttaatttgaaaattataatgtttatgaatacacctttgtctcccgtctccgggcgtttggcttcactcgatatcctacggggtttcgacctctttcttttagttttctttcaaccggtatttgtggctttggggcaacgtttgaattttccgtggcttaatgacattttatatcagttcgatcatgagtcttggattggtttccggttctgggaccttgtgatgccacttttcctgtttatgacaggagcctccatgcctttttccttttccaagtttaaaaatgcccctaataaatggcctgtttatcgtaaaataataaagcgctttgtattgctttttattttcggcatgattgtgcagggaaaccttttgggattgaatcctgattctctttatttatattcgaatacgttgcaggcgatagcaacaggctatcttattgcagcaataattttgttacactgttctttccgttatcaggtgctcattacattattattgttactgctctactggataccgatgactttcttcggcgattttactcccggagggaattttgcagaaaaggtagaccgactagtgctaggccagtttcgggatggtgtgtattggggagaagatggaaactggcatttttctccttattatacttatacttggatatggagtagcttaacttttggagtaacagttatgctaggtacttttgccggaaagataatgaaagaaggaaaagaaaatagaaagggagtggtgaggcttttattattgttaggcatagtattaataggggtatctttgctatggagtttgcaaatgcctattattaagcggctatggacttgtagtatgactttgttttccggaggactctgctttctgcttatgggattattttattattggatagactataaagagcatacctatgggttggattggttgaaaatttatgggatgaactctatcactgcctatattttaggtgaggtcgttaatttccgttgtatagcagcttctatcagctatggcttagagcagtttcttggtaactattattctgtatggttaagttttgctaattatctcattgtcttttttatacttcaaatgatgtataaacatcgtatctttttgaaaatttaaaaatactacaatgaataagaaaagtctgtattggtataataaatgattcctgtcgttataggcgtttctttttcactgtttactattttattagttttttatttcgcgtaactatagtcttcttttcgtataactatggttatgcgaagtaatagtaggcaatgaaataatctatttagaatatgaatgaagtctcaaatgtagcttcccgatgatagtctatatgttccttaaaaactattcaaagatatataattataaaatttaatagatttttttactgaaagaaaatatgcaattagaagattattcagaatttgtttgaaataacttttaccaagttctactggaacttcgtgattcgttttgtaaagtgaactaatgtgttagtttgtatgcaataataattgtaatacgttgcaaatatatagataatttttgtaattgcaatagatttgagtaatgtttttattatctggtcagataaatataaaaaaagaacttatctgttttaatatttttactcaatgaaatgaattgtcaatagttttatttgcaaataagcgtttatatcgtgatttttgtatctatatattatgcgctttttgtaattaactttggtagagtccttattttcttcatttcatacccctctgatatatattctttttttatcacgaagttccagtagaacttagtgtagcgataaataaaaaaagaccttatatcctatgaacagtacagctcagcacagtttatctcctttggtacagtataaccaggttatatcatcttgttttttatattcaatttatggaaaaaagagtgcttttgtccggggattgaataagtcttgtataatgtattatttgaaaccctcaaatccgcaactacgcgcctaatatgatacagaagcgaaaagaatctgcatcgttagtaaaaagggggcacagtgcatcgaatgtcaccataaagacatataaatgccccttaccccaccatgcgacttgaggcaatacgcaaaatcacgactataagttgtcggtgttatccaaagtcattctggaacacattggcataagcattgttgcatgaatagatattcagcacatacttccttgatgtcctgacccatttggctggcacagagatgaacttaaagacaaacgtcttgatgcggcttgttgctttgagtccgaacctcttcacgtcaagcctcgccatgatgaatttatagaagttgcgtatgagtgccataagcagaagaaacaccgtgttttctcccataaaggattttggaagcctgtccagccgaatccgttattcatatcatcgaagatgcgttccttccctccacggaggttatagaattcgacaatctctttctcggaagactcgtagtcatttgtaaggatgcagcggtaggtgtattctccttcccacaggtcgagttcgccgtctatccgcttctgtctttgaatcacaagacggtatgccttccctttccatttctcgatgagaatggaggccagctcaaactcaatgccgcccaattccactttcttccaacctctgagggcaaagatgtcattgtagagcgaactgcatcggttagcacggatatagaaggtcttgcagtgtttagcaatctcttccactatctcttcagaacacgagccgcaatcagctctgaaacggttgataataagcttgttttgttcaaacctttcaaagaacctcttcagcgtgtccttctggtggaaacggacatttgtgttgccgtcgctgttctcaatgccgacaatcaagttgccaataaccgccacgccagggcgataaccaaggaacttcttgtatgtaggcttcgcatcaaacttctcagcctctatgaactggtggtcgaagtcaacgtcatacccctcgccctctttcagctgccctgtggacaataggcaattgaggagcagtgtattcagcttgtctgccgtgttgaagtcgtaggtcttgccagtgtcggatgtgtaggaaatgttatcctgggtcagttcctttatggctctaagaatcgtgtcggcactgcatgtgcgaagtgtcggatgaagcgaaaggtggtacatcagatgagtggtgacatcctcgatgcatgagccgccacaaaaataaacgctcataagcgaacggatgatttcgctgtattgataaccatacagcctgcatctcataccgagggttgagtcgattacagatgagagtctggagtcaaattgctccattattgaaaatattcctccaaaaggagtgagtttctcggatttaattgctacctttgccatgtctgtcgggtttgatacatattttgatttgcaacactaagataggtgaaaaatctgacatggcaaattcctgagcaactttttgttgctcaggtacttaaaaagttatatttgtaatagtgttgcggaattaagggaaacttaacatacccccaagttcccacaaccgatgcaacagaatgtagtatcgggtagtgggattttttgaaaaaacggatgtgattcataagatagaaaatgccatctatttgagaatttccggtgtagcgcttttaacaagattataaactaataacgaatgctggcaaagaaaaaatgaacgtttttgtgaagatagcaatttaatagatgaaagtgctatcctttatttattgaaaacttttaattaacccagattcatgcttatcgaaaaacataagaatgaattgttaacacttttaatttctatgatgaatgaaaaacaaaattgtggaagaatactgcgattattgatcctgttttgtttgtatggtatttgtttacctccccttcatgccaaacaggatattgcatcaccacaacagacaggcaagacctatacaattaaaggagttgtattggattttaacaatgaaccgattattggtgccagtgtttttattccgggaaccagtatcggagtagctacagacttggacggaaattatgtactgaaagtaccggcaaacacgaaaaatatagaattctcttacattggatatgagaagaaagttgttccgttcaaccctaaagatctaaatgtctttcgtgttgtgacgatgaaagaagatagcggtattgcacttgaagatgtcacgattgtagcttttgccaaacaaaagaaagagtctgtattaggctccgtttctactatcaaaccggcggagttaaaaactaccagtagtaatcttactaccggatttgcagggaagttggcgggagtagttgcttatcaaagaagtggagaaccgggtgaagataatgccgaattctttattcgtggtgtgacgacatttggaacagggaaagccgatccgttgattttgattgataacattgaattgacttcatcagatttggcaagattgaataccgatgatatcgccagtttctccattctgaaagacgctactgctactgcgctttatggtgcgcgtggtgctaatggtgttattcttgtaacgacaaaagaaggtacggaaggtaaaatgaaattatctttcagggtagaaagttcgttttccgctccttccaaagaggttgaaattgctgatccgctgacgtttatgaaacttcataatgaggcggtgagaactcgaaatccggatggtgcattaccttatctggaaagcgcgattgctgctcgcgaaaaagggttgaatccgatggcttatccgatggtagactggaaggatatgctattcaaagatttcacaactaactatcgcggaaacatgagccttagcggtggtggccgtgtagcccgttactatgtagcattgtcttattcgcgggataatggtatcttgaaacaggttcccagtaacctttttgataataatattaagttggataaatatacggtacgttcgaatgttaatattaatctgactaaaacaaccgagttgggagtgcgcgtgagcggcacgtttgatagttatcaaggcccgatacagggcggttcgcaggtttacagtcaggctattaaagcaagtccggttctttttcctgccatgtatgctccggatgcagctaaccaatataccaatcatcctatgttcggtaattatggaactagtgcaaattacttgaatccttatgctgaaatggcacgcggttataaagaatatgaaaacactgttatacttgcccagttggagctgaagcaagatttcagttttataaccgaaggcttgaaagggcgtttgttgggaaatgtcacgcgaacttcatattatgaccttcaacgttcttatactccattctattatgccttggatagttatgataagacaaaagatgaatacactctctctgctctaaatccggatttgggtacagattatctaggatactctccgggaagtaaaaaagtaggcagttccctgtatttggaagcgtcgttgtcatacgatcggacgtttgttgaaaaacacaatgtcagtggtatgttggtttatacagtgcgtgaagggaaaagtggcaatgaaaacaccttgcagaaatcactccctacccgtaatttgggattagcaggacgttttacttacggattctccgaccgttattttgcggagtttaatttcggttacaacggttccgaacgttttgacaagagtcatcgttggggattcttcccgtcgggaggtttgggctgggttgtgtccaatgaaaaattctgggcggacaaaccgatttccaaagttgtcaatatgcttaagttgaaaggatcatacggattggtcggtaatgataatatttctaataatgacaaccgtttcttctatttgtcggaagtaaatatgaataattccggtaggggaatgaacttcggaaccaactttgacgaaggttataatggtatttctatcagccgctatgccaatccgaagattggttgggaaatttctcataaaatgaatgtgggatttgaactgaaattattcaatgacctggagattcaggcagagtattttaaagaaagaagaacgaatatcctgcaagagcgtgccgatatccccagtttgatgggattccaggcgcctatccgggcaaatatcggtgaggctaaaggacaaggtgtcgatatttctttggattattcgcatattttcaacaaaaacctgtggactactatcagaggtaatttcacatacgccagcagtgaattttctgaatacgaagaaccggactactcggctactccatggagaagtaaaatcggttctaagctgagccagacttatggttacatagccgaacgtttgtttgtagatgatgaagatgtggcaaactctccgaaacaacaatttggcgaatatacggccggagatatcaaatataaagatatcaatcgtgacggaatcatcgacgagcaggatattgtgcctatcggttatccgactacaccagaaattatctatggtttcggtttctctgtcggatataaggcgtttgatttcaactgcttcttccagggatcggcacggtcttctttctttattagtcctttgcgtatcactccgtttgcccaaccttatgatccggacaacgaattgggagggaaacaggctaacaatgctttacttcaggttattgcagataatcattggagcgagtccaaccagaatatgtatgctttttggccacggttatcggatacggctatcagtaataataaccagtcgagtacatggtggttacgtgacggtactttcttgcgtatgaaatcggcagaaataggctatacacttccaaagcggctgaccagtaaagctaaattggaaaacttgcgtatttacgtaagtgggacgaacttgttcaatatttccaaattcaagatttgggatacggaaatggggaacaacggtttgggatatcctgttcaacgagtatttaatgtaggtattcaactttcactctaaaacatgttatatgaaaaaaataatcatatccatatcactcgtgattgctaccatgctgtgtagcacttcttgtagtgattacctagatatagtgcccgaaggtactccaagcatggataatgccttcagcaaccgcattaattcatttaagtttctacatacttgttatagttacctgccttcatgggatcagggtggctccattggctttttggcaggtgatgaacattggttaatgcctaaaggaaccggttttatagatcagcgtatctctctcaacgcatgggaaataggtcgcggtgaacaaaataataatgacccctaccagaatttttgggatggaggaaatgggggaaccaatctttgggtagctatccgcgattgtaatattttcttggaaaatatcaacaaacctctcgatttgcagaattatgaacgcacccgttggattgcggaagtaaaattcctcaaagcatattatcattattatctgtttatgctttacggccctattcctatcatggatactaatattgcggtagatgcttcacaggatgaagtaaggcgttatcgcgagccggtggatgatgtagtggcttatatctctaacctgctggatgaagcatataaagatctgccttcaaagatcacagatccaggacaggagatggggcgcatcacccagccaattgcaaaagcagtaaaagcacaattgttattattggctgccagccctttgtttaatggaaattcggattatattaatgtgaaagataatcagggtaggcatttgttcccgacacaggttgataacagtaaatggaaattggcagcagacgcagcgcttgaagcgataaattgtgcaaaagaaaatggtcacgagaaactttatactttctctttgccgatcaatagtatttctgcggcaacacgcaaactgctggatatcggtgaggctgtcacagaaaaatggaatgaagaaattatttggggaagtactcggaacgttaacggattgcagacggttgcaatggctaaacatacgaaggggagccactataacgcgcgttctgttttaggaccaactttatcagtagccgaagcattctattcttcaaatggtgtgcctatttctgaagataacagtgatttctggacggctaattatcctaaccgctatgagattaccactatcccggatgagggaaataataaatattaccttcagataggagagcaaacagcctatcttcacttgaaccgtgaaccgcgtttctatgcttcattgtcattcgaccgtggaacatggtatggagatggttatacgaatgatgagccggcaaatcttgctttctatcattttcgggcaaaggaggtatcagggcgccagacttcggaagaccattcatatacgggatatttgaataaaaaggtatgtagctataagactggtttgacaaaagacggtttctctccctaccgttattcgttcccaatcatacgtcttgctgatttgtatctgatgtatgcggaagctttgaatgaatcgcaggaatcacccacacaggatgtatatgattacgtggacttggttcgcgaacgtgcagggttgaagggggtaaaggagtcgtggagtaaatattccaagtccccggataagcctaatacgaaaaacggtatgcgtgaaatcattcgtatggaacgtttgaatgaactggcctgtgaaggaaaacgtttctgggacttgcgtcgttggaaaaaagaacttccccgcgaagtgaaagggtggcatattcaaggagagactgcccaggaattttatagagtaaccactatctacttacgttcaaagtatagttataaggactatttgtggccgttgaaactggaaacaatattgaaagatccgaacctggtacaaaacccagggtggtaactatgatattcataatttaaaatgactggaaatatgagaaatatgaataatatatcagagcttgtgaaatatgcgttcgtcacattgctcggtacactctgcctagcaggatgtgggcaggacgaaaagattggtctcaatgctaccgacagtgtagcaccgggattgcctacgaatatagaggtggagaacattaatggaggagctatcattcgttatactcctccgaaagatgatgatctcttgtgtgttgtggcgtcttatatgattaatggggtggaaagaaccacaaaagcttctccttatgtagatagcttgatcgtagaaggattcggaaaggtgggtgactataatatctttttgaagagtgtagacaaaagccagaacgagtctgaaccgaaaaccgtttctatcagtccattaactcctcctgtagaatatatttatgagtcactcaagattactgatagttttggaggagtgagtttgacgtggaaaaatccgactcgacagaatattattctggaagttaccaaaaaggaaaacggagaatgggtttctttggagaatttctattccagtatagtggaagggcaagctaaaatccggggattggctgctgaaccaatcacgttaggatacagaattcgtgaccgttgggataattattccgagatgttggagctggaaagcaatcctttgtatgaagaggaacttgacaagtcgaaatttaaagaacttccgacacgtttgcctggtgattgtgaggcaatgggtggtctgccgatacgaaatatctggcagggtaataataacacagactgtttccatagtgttactaatagtgataaccctgcccctggtcggtgtataacgttcgatatgggacaggttgccaaggtaagccgtttcaagatgtggcaacgcagaggagatgcaaacgtttggacctatactcataataatttgaagaaatatgtgatttatggttgtacggaacttacggacgaaatgtataatagcggtcaggaaaaagatggtatcatgtatcctacctttgagggttggacgaagattatggatgttgaatgttataaaccttccggacaagataatccgaatataaccaatgaagatattgaatatatacagaatggcgatgaacacgaagttcccattgaagctcctaatttccgttatgtaagaattcttatgcttgaaacctggagtggaggtacttacgctcagattggcgaaatgactttctggggacaacctgcaacagagtaattaaaaaaatcagattatgaaaaatataataagatatatagcttgtggcttgtcagcctttttgatgaccgcttgcggagatatgtatgagatacacgaaaaataccttgaaatgggagaagaaacctatctcggggccgttcaggatttgagtgcctatagcgggttcaatcgtgtcaagttggagtggtatctgaatgccgacccacgaatcagctcttgtgtgattacgtgggagggaaatgaaaatcctgtggtagttcctgttccggagaatcgtgttataaaggatcctatatcgacgattattgaccttccggaagggaaatatatattcaatatgataacgaggagtgatacaggtaaagagtctttggtaagaactattgcgggtgaagtgtacggttccacttatcaggccagtctatcagctcagggaattaattcgatctcggcagatttgaacggagtaacgattaattgggttccgttagaggggtgtaccggaactacgttgacgtatacaaatgatgagggaaaggagaaaatcatcaaagtagatgaagggcaaacttttacggttataccggatgcggtccttaagacatcatttaagttgatatctacatttaagccggctgatgacgctttcgatgatattccaactttggaaaaaataatggattttcctgcttattataccatttcaaaagaagattgggatgcggttcacgaacaatatgttgatgcagacagaacggattggggaatctcggcttcgacagaagaaaaggttggagaaaatgctggtaaatatggtattgccacctgtatccttgacggagatcttgccagtttctggcactcacaatggaaaggtgaaggggctaatcctccattgccacacgaaatcattattgatatgaaatcacaacaggatattctttcgatagaactggcaagaaggcaaggtaacggagatactaaaactgttatattcagcataggtgaaagtgaagaacattggacagaattgggacaattgaacttccctagtgaaaaggcgaccaatgcccaaaccctgctgttgccggaacctgtaagaggaagatatatacgtgctttggttacgggtagtaataatggtgtaaatgcaagtattgcagagataatgtttacgacaagtaagaaataatattattaatagtgagtccgttgaagtgacagagttcaatagatagctatatttctcactaaagaaaggttagagccgctggagaatcgggtttatgtgaataaatgcgatttgatggcggctctttatttaataatcgaacataatttgctatctttgtataaatataaagtaacgcgacaacttcttctttaatacatatttgcttatgagatttattgctttatttatatgcttgtcaatagtcggaatttccggtattacccaggcgcaacaaaaagatactatccgtgtttcaaacttcggagcacatccgtatacatatgaaaattgtgtgacctgtttgcaggaagctattagtgaatgtaagcgaagtggtgctcgcgtgctctcttttgagaaagggcgttatgatatctggcccgaaggtgctatccggcggaaatattttatatcgaatacatcgaccgaacaagagtgtccttccaaagtgaaaactatcggtctgctgtttgaagatatgaaagatctgctgattgaaggaaacggagcaacgctgatgtttcacggaaaaatgacgactatcgctctcgaacgttgtaagaatctggtgtttaaagatttgcatattgattttgaacgtcctgccggttcggaaatgacatttgcccgtgtggaagatgatgaggtggaagttgttgtacatcgtgacacacgttatgaaatagtgaatgggcggatgagcctctttggtgagggttggcgttcaaacaagaatcattgtatagaatatagtcctgttgatagtactttccgttatagccaggggtggaatgtgcttgctgctgcggaggcggaaggggtgcccccgaatgtagtacgtttccatgtcccggaaggatttcgcccgaaagtggggaatactttgacaattcgtgacattattcgtgaccaggtgggatggtttattttcgaaagccgggatattacacttaaccgggtgcagatgcactatatgcatgggcttggtatagtaagtcaatacactcgtaatattaccatggataaagtgaaatgtatgccgcgcgaaggcagtggcaggttgttggcagcttctgcggatatgatgcacttttccggatgtagtggaaaggtgaagatagttggttgttattttgcgggtgcacaggatgatccgataaatgtgcacggtactaacttgcgtgccgttgagaaaataaacacccgtactttgaatttgcgtttcatgcatggacagagctatgggtataacgcttactttgagggggatacggtcgcttttgtcaaggcgtctactatggaacgttttgcgtctgcgcaagtggttgctgtgaaacggttgacagaccgtattgttcaagtcaccttcaatcgggatattcccggtgaattggaactgaatcacgattgtgtggagaatatcagttgcacgcccgaagtggaaattcgtcattgttattttacgaggacaagtacgcggggtaccttaatgactactccccgaaaagtagtgattgcagataatacttattataaaacgggcatgagcgctatcctgatagaaggagatgccgaaggctggtatgaatcgggaccggtgaatgatgttttgattcagaacaatatatttatcggctgtgcgtatagtggagggcctgaaaatgcagtcattgcgttgcatccttctaatacggtggtggatgcggaacgtccggtgcatagaaatgtgcgtatcataggtaatacgtttcgtacatttgggaatccggtgttatacgccaaaagtacgaaggatttgatttttaaagagaatcatgtagaatgtacttcttcggacgattttcgtcaaaagcctttgtttattttaaatggttgtaaaggtgttgtaatcagagagaataagctggaggaggtttgtgataaaaaaatggaatttagacagatgaaaaagaaatatatcaaggttgatttttaaccccaaaaaataaatactatgacaatgaagaaactttattcattttttatcagtactttacttgtctcctctgccgtttgtgccggagggacagattatacaaaaggacttgctatttggtttgatgctccgaatactttgcaaggacatgccgtatggtatggtggcagaccggatatgtggaaaggtgaaaataaaccggaaaccgccggtgatacagcccgtaatccggatgctgcatgggagtcacaatcattgcctattggaaatggcagtataggggcgaatattatgggatcggtcgaagctgaacggattacttttaatgaaaagacactctggcggggtggtcctaacacagcgaaaggagcggattactactggaatgtcaataaacagtcagcgcatatccttgatgaaatacgtaaagcatttacggaaggagaccaagttaaagcggagaggctgacgagacagaattttaatagtgaagtaccttatgagggcagcagggaaaagcctttccgtttcggtagttttacgactatgggagagttttatgtggagaccgggctgaatattattggtatgagtgattataagcgtattctttctttggactctgctatggctgtagtgcagtttaaaaaagacgatgtagcgtaccaacggaattattttatttcttatcctgctaatgtgctggtcatgcgtttcagtgccgaccggccgggcaagcagaacctgatattcagttatgctcctaatccggtatcgacaggtagtatggtggctcaaggtgataatggcttggtttattcggctgcgctggataataatggaatgaaatatgtagtccgtatccaagcggagactaaaggtggaacattggtcaatagaaatgggaaactcaccgtgaagggagcggatgaagttgtcttttatgtcactgcggatactgactataaggctaactttgctccagactttaagaatccgaaaacgtatgtcggggtcaatcctgtcgaaacaacgggccaatggctggctaatgcggtggccaaaggttattcggctctgttgaatgagcattatcaggattacgctgctttattcaatcgggtgaagttgaatctgaatccaacggtaaagaccggtaatttaccgaccgggcagcggttgaaaaattatcggaaagggcagccggactattatctggaggaactttattttcaattcggccgttatcttctgattgcaagttctcgtccgggcaatatgccggccaacctgcaaggtatctggcataataacgttgatgggccttggcgtgttgattatcataataacataaatattcagatgaattattggcctgcctgttctacgaatctggaggaatgcatgttgccgttaattgattttatccgcacattagtgaagccgggtgaaaagacggctcagtcttattttggtgcgaggggctggactgcatctatttctgctaatatctttgggtttactgctccactggaaagtcaagatatgtcgtggaactttaatccaatggcaggcccttggctagctacgcatatttgggagtattatgactatacacgggatttgaaattcttgaaagagacgggatatgagttgataaagagcagtgccaattttgcagttgattatttgtggcataagccggacggaacttatactgcggcaccgtccacttcacccgaacatggccctattgatcagggggccacatttgtacacgccgttgtgcgtgaaatcctattggatgccatcaaggcgagcgaggaattgggagtggataagaaagaacgtaaggaatgggaacaggtgcttgccaatctcgttccttataagatcggccgttatgggcaattaatggaatggtcggtagatattgacgatccgaaagatgaacaccgccatgtaaatcatctgtttggtctgcatccgggacatacggtttctcctgtcactactcccgaattggctgaagctgccaaagtagtattggtgcatcgtggtgacggggctacgggttggagtatgggatggaagttgaaccagtgggctcgcttgcaggacggcaatcatgcttataccttatttgctaatctgctgaagaacggtacgcttgataatttatgggatacgcatccgcctttccagattgatggaaactttggtggtacggccggtattacggagatgttactgcaaagccacatgggatttatccaactgcttcctgctttgccggatgcatggaaggaaggctctgtccggggtatatgtgcgaaaggaaatttcgaggtagacatgatatgggagaacggacttttgaaggaagcgactatcctgtcaaagtcaggtgaaagatgtattgtgaaatatgccggcaagactttgtcttttaaaactgtaaaaggacatagttatcaactaaagtatgatagcgtgaagggggaattgctaaaacgctgacagaaaaatgattgttacttatttgaaactcttttatacatttgcgaaaattggcatgttcaccattggaggtggatatgccatgattccgttgatagaacgggagatagtcaagaaaaagtggatgagtaaagaggaatttatggaaatgtttgccttgacccagtcattgcccggtgttttcgcagtaaacatatctatttttgtaggttataaacttcataaggtgattggtagcctggtgtgcgcactggctaccatattgccttcttttgttattatgatgttgattgcgatgttctttgcccgttttcaggataatgaggtgatgatccgtatctttaacggaatacggccggcagtggtggcattgattttattcccttgcatatctgcggttagggcattgaagctgaaatatatacagttgatggcccccctcattgctactgtgttgatctggcaattcggactttctcctatttatgtagtattggcgggaattgcgggcggactggtttatactttatggttgaaagataagattaaagatataaaggcatgatatatttacaattactttgggtgtatctgaagatcggtacgtttggcttcggaggtggctatgctatgctttcccttattcaacacgaaattgtggatattcatcattggctgactccccagcaatttacggatgtagtggcgatttcgcaaatgacaccggggccgattggaattaatagtgctacttacgtgggatatgcagttacacaaagtgtatggggagcggtgcttgctactgtggcagtttgtttgccttcttttattttagtattgctcatttcttatttctttgccaaatgcaaagataataagtatatcaaggcggcgatgtcggggctgcttcctatgtctgtggcattgattgcttcggcagccttactgatgatgaacaaagataactttattgattataaaagtattgggatttttgtcggtgcttttctgattacatggaaatgggagctacatcctattctgctgatctgtcttgctggtatagtgggagtgttgttgtattaaaaaagcttattaaaaagttctttattactagtctattcttactttgtctatttttgtgaagttggataaaaatcatactatggtatatttggacgctgataaacagacttatgcggatttgaacgttacagggaatgtgtatggtgagcaggcgctttgttctttgtttttaaaagcagaaacgaagaaaggaaagtcgctgatgctggattggattatgcatccgttgagtgattgggaagagatttgtaaacgtcaggaagctatcgcctgggatttcttgccggaacttcctttaaatgaggaagaactggactttattgaatattatctggaatatcgcgaacagataaggggagcaaatatattactttcatgtgcgacgattattgatcgtcttgtacgatatgacccgaaccggtatgtggtttcccgaggagtgaaattggtttttctcatgttgcaccgtttggagaaatggactattgcagcaggggggaatatgccacaacttttaaaagaaacagctgataaggtacaggaacttttgcatggaagtgaattagaggaagttctgcaacaaactttagatgaaaaggcacgcttgtcgaattatgccatagataaatatgattatttatttcgttgtacacggttattgtccataagggagttgttgtctgttgtctacatgtttgatgtttgcaggacggcgcatcgggtagcgaaggcaaagaatttctgtttcactccgaccatggtgcagacaatggagttctctgttgaaggtattgtacatccttttgtggaaaatgcgcaaaagaataattgggaaatgtcctgtgggaatatatgtctttttacaggttccaacatggcgggaaaatcgacaactttgaaggctttggcgctggctgtctggttagctcattgcggtctgcccgttccggttaagtcaatgatttgtcctgtttatgaggggatatatacatctatcaacttgcctgattctttgcgggacgggcgaagtcattttatggcggaagtgcttcgtattaaggaagttctacaaaaggcgggaaccggaaagaaatgtctggtcattctggatgagatgtttcgggggactaatgctaaagatgcatttgaggcttccgttgcggtaaatgaattattgaaggagtattccaattgtcattttcttatttcgacccatattctggaatatgcaaaggcatttgaactagatcctttctgttgtttctattatatggaagcggaaatcaaagatgataattttgtatgtccacatcggttgcagaaaggtatttcagaagctagagtcggctattgggttgtgcggaagttactgaatatggttgagctgaaaaaataagaaaagcccgctaaagattcttctccaacgggctttcttgttttatctgaagtgaattgttttagatcttgttcgcacgtttgcgctctatttcgtccaaaatgactttacgcatacgcattgctttcggggttacttctacatattcgtcttccttgatgtactccaatgcttcttcgagtgagaactgaacgggaggaatcagacgaactttatcgtccgaaccggaagcacgcatattggtcaacttctttgatttggtaacgttgataaccaagtcgttgtcgtgagagtgctcacctaccacctgtccagcatagacttcatcttgcgggaagataaagaatttaccgcgatcctgcaatttgtcgatagcataagcaaaagcggttccgctttccatggcaatcatagaaccattggtacgacgttcgatttctcctttgtatggctggtattctttaaaacggtgtgccataatagcttcaccggcagaggcggtcagcacattggtacgaagaccgatgatcccacgtgaaggcatatcaaattcgagattgatacgttcgcccgtattttccattttgaccatttcacctttacggcgggttaccatatcaataatcttactggaatattcttccggtacgttgattgtcagttcttcaatcggttcgcattttacaccgtctatttctctgtagataacctgtggctgacctacctgcaattcgtatccttcgcggcgcattgtttcaatcagtacggaaaggtgaagtacaccacggccggaaacaatccatttaccatcctcttcactcttctttacgcgaagagccagattcttgtcgagttccctcatcaaacggtcatggatgtggcgtgaagttacaaacttgccgtcttttccgaagaacggagagtcgttgatggcaaataacatactcattgtcggctcgtcgattgcaataggtggcaatgcctccggattttcgaagtcacaaacagtatctccgatttcaaatccgtcgatacctaccaatgcacaaatatctccagaagaaacttcacttgtttttacacggcctagaccttcgaatacatgaagttctttaattttacttttaagcatatcaccgttgcgctttacaagcgttacgttcataccttcttttaatgtaccgcgatgcacacgacctacggcgatacgtccggtataagaagaataatccagagaagtaatcaacatctgcggagtaccttctaactgtgtcggagccggaatgttctcgatgatacaatccagtagcggagtgatcgtttcagtcggcttctgccaatcggtgctcatccagttgttcttggcagaaccatagataacggggaaatccaactgatcttccgtagcgttgaggctgaacatcaagtcgaaaaccatttcgtatacttcttccggacggcagttcggcttatctaccttattgactactacaatcggtttcaaaccaatttccaatgctttttgcagcacgaaacgagtctggggcatcggaccttcaaatgcgtcgaccagcagaatacaaccatcggccatattcaatacgcgttcaacttcaccaccgaagtcactgtgtcccggagtatcaataatattaattttagtaccgttgtagttaatggaaacgttcttggaaagaatcgttataccacgttcgcgctccaagtcgttgttatccaggataagttcaccactattttgattgttgcggaacaaatttccggccaacagcattttgtcaaccagcgttgttttcccatggtcaacatgggcaatgattgcaatgtttcgaatattttgcatataatacctattatttggctgcaaaggtacgaaaataggattagaaatatatgctatactcgcatttttttcttgtaaaacgttgtgggatataaagataatgcctatctttgcacgctcaaaagaatatttactatatcaaaattctaaaaattatgtatttagacgctgctaaaaagcaagaaatcttcggaaagtacgggaagtctaacactgatactggctcaactgaggcgcagatagctttgttttcctaccgtatttctcgtctgactgagcacatgaagctcaacagaaaagattatagtacagagagagccttaacaatgttggtagctaaacgtcgtcgtttgctcgattacttgaaagctaaagatatcacaagatatcgtgctattgttaaagaactcggtttgcgtaagtaatctacttgccgcgaaaaaattgaagaagccgtttctcattatgaggaacggctttttagtttctccctttttctatcggatagtcatattttctttggttataattgtgctcatctaaagattttgttatttttgcaacttaattattataatttatcacctttgacaactaaaatgcttacaatatggatacaagtaaaattgtaggagagaaaattaagtcactccgcgaagataaatcaataaccatagaagaattggcgcagcgttctggtttggctatggaacagattgagcgtatcgaaaataatatcgatatcccttctcttgctccgttgattaagattgctcgtgtattgggtgtacggctggggactttcttggacgatcaggacgaagtggggccggtggtatgccgtaagaaagaggcaaaagacgctatcagcttctccaataatgcgattcactcacgcaaacacatggaataccattctttgtccaaatcgaaagccgaccgtcacatggagccattcatcattgatgtaatgccaactgaagatactgactttgttctttcttctcatgagggagaggagtttatcatggttatggaaggtatcatggaaatcagttatggaaagaatacataccttctggaagaaggcgatagtatttattatgactctatcgttcctcaccatgtacatgcttacgagggacagactgcaaagattctggcagtagtttatacaccgatttgatgttatgtaagaaccaagatttaagtatatcgtatgcaattatttgaccgtactttgggacagtggctggaacactgggctgaagagactcctgataaggaatatatcgtatattccgaccgcaatcttcgatttacctggagccaattgaatcgtcgcgtagatgatatggcgaaaggacttatcgccattggcgtggaacgaggcacccacgtaggtatctgggctgctaatgttcccgattggcttacattgctttatgcttgtgctaagattggtgccgtatatgtcactgtgaacacgaactataaacagtcagagttggaatatctttgccggaactcggatatgcacacactttgtatcgtaaatggcgagaaagatagtgattttgtgcaaatgacgtatactatgcttcccgaattgaaaacttgcgaacgcgggtatttgaaaagcgaacgtttcccatatatgaaaaatgtagtatatgtcggacaggagaaacatcgcggaatgtataacacggcggaaatcctgttgctgggaaataatatcgaggatagttgcctaaatgaacttaaaagtaaagttgactgtcacgatgtggtaaatatgcaatatacatcaggaactaccggttttccgaaaggggtaatgcttacacattataatatagctaacaatggtttcctgaccggtgagcacatgaagtttacggcagatgataaactttgttgctgtgttccgttgttccattgtttcggggttgtattggccaccatgaactgcctgactcatggttgcacgcaggtaatggtagagcgttttgatccgttggttgtgctggcttccattcataaagagcgttgtacggcgctttatggagtgcctactatgtttattgccgagttgcatcatccgatgttcgacttgtttgatatgtcttgtcttcgtacaggtattatggcaggctctctgtgtcctgttgaattgatgaaacaggttgaggagaagatgtatatgaaggtgaccagtgtatatggtctgacggaaacggctcccggcatgactgccacccgtattgacgattcatttgatgtgcgttgtaacacggttgggcgcgatttcgaatttacggaagtgaaagtcattgatccggaaacagatgaggaatgtccggtgggtgtacagggagaaatgtgcaaccgtggatataacaccatgaaggggtattataagaacccggaagctacggcggaagtgcttgataaaaataacttcttacactccggcgatttgggtattaaggacgaaaacggcaattaccgcatcaccggacgtatcaaggatatgattattcgcggtggcgaaaatatttatccgcgtgagatagaagaattcctttataaacttgatggagtgaaggatgtacaggttgcaggtattccttctaagaagtatggtgaggctgttggagcgttcatcattttacaggaaggtgtcacgatacaggcggaggatgtacgtgacttttgcagaaacaagatttcccgttacaaaataccgaaatatattttctttgtggacgagtttccgatgacaggtagcggaaagattcagaagttcagattgaaggatctcggtctgaaactttgtaaggaacagggaattgagataatttagagatcttataatttaagtctttatagtttagacacacaaaagtttttcattataaaaaacagtgaacggtgaacaaactgtatttaggttacagggagttcaccgtttgctatttatattgttacctttattctgttctaatcaaatttctgctatcgtgtaattctaaataaagtcgtcaccgagttgcatttgggcatcatttacatatttacgaatggcatgttcttcatccttacgacagattaacagcacgttattcgactcagcaatcaggtatccttccaaaccgtcgattacggcaagttttcctttcggaagtactaccatattatctttgctgttatagataagcgaatggcatttcagagtgacattgccatcctgatctctttccgataaatcgtagagtgatccccacgttccgagatccgaccagccgaagtctcctagagatacatatacattgtctgctttttccataatgccgaagtcgatagatacattgggacatgcggggaagttttcttcgataaatgctttttccttctcagtggcatagatgtcttttcccggcgctaattttgaagccagttcaggtagcagatattcgcaggctttgatgattgtatttacgttccacataaatagaccggaattccaataaaactctccactttctacaaatacctgggctaattccagctccggcttttctgtgaatgttttcactctgtagaaattttctccggcaggttcgtctatttgtatatatccataccctgtctctggacgattcggcttgatacccagtgtcaatagtttttcggaacgcgatacgaagttcagccctttttcaatggcagcgagaaattcgtcttctttcagaattaaatgatcggaaggagcgactacgacattagcgtttggatttaatgcgcgaatgtggtaggaagcccatgctatacaaggagcggtgttccgtcttgccggttccagcagaatctgatcttcgtttacttcaggtaattgttctttcactaagtccgcatacattgcattggtgacaatgaaaatattttctgttggaataactttttggaagcggtcaaaagtttgttgtaaaagtgaacgcccggtcccgaagaaatctaaaaactgtttggggagtgttttacggctaaacggccaaaaacggcttccgatacccccacccataatcacgcaataattattcatgtttgtcatgatagtgactctattttaaatgtttttgctaatgtacggtttattctctgaatagagaagtgtttaagatatgttttattatttttttctccttttttttgccaaactattgtgaattcaaaataatgtcgtatctttgcaccgcaattgagaaatcaagcacgcgcccagatggcggaatcggtagacgcgctggtctcaaacaccagtggattcacttccatcccggttcgaccccgggtctgggtacgaataaaccctgataatcacctgattatcagggttttctgcttttatagggcgtactaaatgtgtactgaatgacgaatacaaagaaaagggatcaatgaataaccctgagggttaaatatataaattgttatctttgtctccaaattaatagcttatgaagttaaatggttatcaccttcttcttcctgaaggaactttggattactttgatcttgttgatgtgaaggaaagcatgaatgaagttatcatttaccttgaggagaagaatcagctccccgagaagtatgctggtcaagaaacagagagtaaagggttttatgagcctgttgttgttcaagactttcctcttcgtggcaagaaagtctttttgaacctccgtcgtcgccgttggattttgaaaagcagcaatgagtatatttcccgcaattggcgtatggtggctgagggtactcgtttgacgcaagactttgggatcaacgtaagaatctgagggattttcattttatgcatataatttagcgagtctatacaagaaaaatgctttatctcttactcctctgaactgtgccctgaacgctttgattttagcattaaatgattctgctgctgcattggtagcccttctttcaaagaagtttattatattcagatagtgcgtttgtatcgagcgcgctacccttccaaaggtgagaaaccccgctttgtctacttcatcataccaccttgcaagccttgtcaaagctatatctttaaacttacactgatgatagattgatcctaaccgcatggccatataatatcctttctttatatcgggatattctttaaatagaatctcggcccgtatcctttgagactgagtccatagagattcttttttgtaaagcagataaatactccttgccagcaactgttttcttgtatctccattggcgaaaacgggcgcatgatacatctttccgcaggtcttggcgtaagctatctgtatggactcttcgtccaaagcctcccagcgagctttcacccgcatctcctgaaccgcttcatacgctaatttctgtacatggaaacgatccgtaacccgtttggcagcagggaagcaagtccgggcaatctgttccatattgggagccatatccaatgttatctcacgcacctggtagcggcgacgacgcgaaagtttaagcaggacagaggtaaccgtgcaaacatccgtacctttaatgataccaataatactgcctttaccaccgtgagtctctttattaatcaacactgtatagagttctccacgggaaagagccacttcgtcaatacagacgtaggcaccaatgttcttctcaaacaggagccagttctctgcgtgagcaagctgatcccagtgtaggtaattacttaaatggttgcggtattgacgttccaacaaatccccgtcaacgccatataaagtacccaataacttgcaactgatcggataattatcaatatagttcttttaaaaaagacgcaaagtctggatcaatgaataaccctgagggttaaatatataaattgttatctttgtctccaaattaatagcttatgaagttaaatggttatcaccttcttcttcctgaaggaactttggattactttgatcttgttgatgtgaaggaaagcatgaatgaagttatcatttaccttgaggagaagaatcagctccccgagaagtatgctggtcaagaaacagagagtaaagggttttatgagcctgttgttgttcaagactttcctcttcgtggcaagaaagtctttttgaacctccgtcgtcgccgttggattttgaaaagcagcaatgagtatatttcccgcaattggcgtatggtggctgagggtactcgtttgacgcaagactttgcgtcttttttaaaagaactatattgataattatccgatcagttgcaagttattgggtactttatatggcgttgacggggatttgttggaacgtcaataccgcaaccatttaagtaattacctacactgggatcagcttgctcacgcagagaactggctcctgtttgagaagaacattggtgcctacgtctgtattgacgaagtggctctttcccgtggagaactctatacagtgttgattaataaagagactcacggtggtaaaggcagtattattggtatcattaaaggtacggatgtttgcacggttacctctgtcctgcttaaactttcgcgtcgtcgccgctaccaggtgcgtgagataacattggatatggctcccaatatggaacagattgcccggacttgcttccctgctgccaaacgggttacggatcgtttccatgtacagaaattagcgtatgaagcggttcaggagatgcgggtgaaagctcgctgggaggctttggacgaagagtccatacagatagcttacgccaagacctgcggaaagatgtatcatgcgcccgttttcgccaatggagatacaagaaaacagttgctggcaaggagtatttatctgctttacaaaaaagaatctctatggactcagtctcaaaggatacgggccgagattctatttaaagaatatcccgatataaagaaaggatattatatggccatgcggttaggatcaatctatcatcagtgtaagtttaaagatatagctttgacaaggcttgcaaggtggtatgatgaagtagacaaagcggggtttctcacctttggaagggtagcgcgctcgatacaaacgcactatctgaatataataaacttctttgaaagaagggctaccaatgcagcagcagaatcatttaatgctaaaatcaaagcgttcagggcacagttcagaggagtaagagataaagcatttttcttgtatagactcgctaaattatatgcataaaatgaaaatccctcagattcttacgttgatccgatattagatagttgtatagcgcatgactataaaactaaagtagatgcactatttttaaaacgtgagtatttgacgcaagcccagctaaaggattatttgcggcaagaaattttccgtgtgactgaaaatattgtagctatccaacaaaaataccgtgtcgtgcgtaacattgtattggatatggatattcccgattttttgtgggaaagcggttattttgaggacttgaattctgatgaaagaaaaaagtatatcggtttccgctgctctgattttgatatggatgcatatttgcatgaaccgtcctgttatgatgggcggcttccctatttgtccattatcgttaatcttgtcgtgctttccaagtatttgcgctatctgcaagaacaggaaagcaattaccatacagatgcggttgccatccaagagcaagccttgccaaaagagaaagaggaaagtgcagatactaatccaaccaagattgtgggcaaaagcaatcctttcaagtccacgttgaaagccaatgaaatcaaacttctgaccgactgtgtgaatgaagcgaatatgtttactactaccgtcggtgtcaaaatacttaccgattttttcaactgcaaactgaatggggtattgaaagttaataatacccgtctgttagcctatcttatgatgcaacttagctgttataattacatcgtttatgaatggcagtctgtcatagcaaacaataagctgatattgaagaagataaaaggtgaaccgcttacacgtactgacctgtcgagtgcgacagaccaagcgaaaaacatctatccgaagggatatgaaatcatagacaaatacatcaaacaactgcaaaaaggttgagcatagattgaacgctcaaacaaaggtcaattagacttcattttcaagctcttaactttgcccccgttaacaaaaaaaacgagggtgcgcaccttcatattgtttcacctaaattcctaaacaatatggaaagagatttagagttaagagtttccgaactcgaaaaaatgttgttcctttcaaagaacgtgcttagcttcgatgaagcgagcaagttcttgaacctttcaaaaagttacctgtacaagctgacttcgggtaacttgataccccattacaagccgcagggcaaaatgctttattttgagaaagcggagttggaagcatggttacgtcagaacccggtcaagacgcaggcgcagatagagcaggaagcgcagaagtatatccttaatcgtcctctaaagaaataacggctatggaaaatagaaaagcgacagaagccgggcaggacgtcaccatgcagaaagaggatttcgcagccctttggaaaaccattcatctaaaggtgacggacacttacgaagtgccgcctgaaatactttgggtgaacggctctaccattggcacgctgggtaatttcagcgcatccacaggtaaagccaagagcaaaaagacattcaacatttccgctatcgttgcggcagcgttgaagaatgacgaggtgctgaagtattcggcatacctgccaccgaacaagcggaaaatcctctatgtagataccgaacaaagcaaataccattgccacaaggtcatggagcgtattttgcggcttgccggactgcctaccgacaaggacagggacgattttgtattcatcgtgctaagggagcagacacccgacaagcggaaacagattatcggctatatgcttgaaaatatgcccgatgtgggactgctcatcattgacggaatccgtgacttgatgtatgacatcaacagccccagtgaatcaaccgacctaatcaacctcttgatgcgctggtcaagcggatataacctgcatatccacactgttctacatttgaacaagggggatgacaacacaagggggcatatcggtacggaactgaacaacaaggctgaaaccgtcctgcaaatcacgaaaagccagcaggacggcaacataagcgaggtaaaggcgatgcacatacgtgaccgggagtttgccccgttcgcattccgtatcaacgacagcgcattgcccgaagccgtggacggttatgtattcaagcagcccagccaagacaggggctttccactggcagaactgacggagcaacagcacaggacagctttggaaaacggttttggcaaacaggttgtatatggttacgagaatgtcctaaagaccttgaaacagggttatgcgagtatcggctacaagcgtggacgcaatatccatgtggatttgaacaaattccttgtgaacaagcgcatgattgtgaaagagggcaagggctaccgctataatcccgatttccattattaaaagtcagtttggtttagtccgggtgtatatataagcggaacagacttactatttccctgtattggcaacaagcaggtttagtatggtacgggtatatatataacggactaaacaggactggtgcacttttcaactattttttagtccccaaaaaagaaaatgttatgaatatcgaagatgtgaaacaaatacccatcgcagactatctgcacagtttaggctactctcctgtcaagcagcagggcaacggcttatggtacaaatcaccgttaagggaggaacacgaaccgtctttcaaggtgaacactgaccgcaacctttggtatgactttggcgcaggcaagggcggtaacatcattgcactggcaaaggaactctattgctccgacagcctgccataccttttaaaccggatagcggaacagacaccgcacgtccgcccggtcagtttttcttttccccagcgtaggacagaaccgagtttccaacatttggaagtccgtgacttgacccatccggcattgctccgttacttgcagggacggggtatcaatatcgaactggcaaaaagagaatgtaaggaactccactttaccaataacgacagaccgttctttgctatcggtttcccgaacatggcaggaggttacgaggttcgcaattccttttttaagggctgcattgccccgaaagacatcactcatatacggcagcagggagagccgagagagaagtgtttggtattcgagggttttatggactatctttctttcctcacgctccggatgaagaactgtccgaccatgcccgaccttgacagacaggattatgtcatactcaactctactgtcaatgtgccgaaagccattgacgtgctgtacccgtatgaacgcatccactgtatgcttgacaatgacaaggcaggatatgaagcgacacgggctatcgaattggaatactcctatcgtgtgcgcgacttctcggacaattacagggggtattcggacttgaacgattacctgtgcggcaggaagcaggaacagaagaacagtaccagccaagcgcaggcgataaagcaggaaaccggacaacgtgccgccccaagacagaaaaggggcaggggcatttagtccggcaggattaccagcggcaggcggtttaatttggagagcaaggttatgtttcggtaaaccgaaactaccttgctttgcttgatagcaaagaaaatttctcccgttggtcgcaatttttaagataccatttaaatgtaaaaaactatgacgaatataaaggataagccggggggacgtccggcaaagaaacggatagagaagcagcaacgggtagtcagcacgaagctgaccgagttgcagtattacgccatcaggaagcgagccggggaagccggattgcgtgtcagtgagtatgtccggcaggcggttgtttcggcagaggtcataccccggctgaacaggcaggatgcggacaccatccgcaagctggcaggggaagccaacaacatcaaccagttggcgcaccgggcaaatgccggaggtttcgcactggtggcggtggaactggtaaaactcaaaaacaggattgtcgaaattataaaccagttgtcggatgattggaaaaataaaaaagggaagcgggtttaagggctgcgtgaactatgtgttgggcaaggaacaggcggctttgctccatgcagacggggtactgacagaaagccggggagatataatccgcagcttctgtatgcagaccgggatgaatcccgacttgaaaaagcctgtcggacatattgcgctaagctattccccggtggacacacccaaattgacggacgagaaaatgatacagcttgcgaaggaatatatgcgtgagatgaaaatcaccgatacgcagtatatcatcgtgcgccatcaagaccgggagcatccgcacgtgcatatcgtgttcaaccgtatagacaacaacggcaagaccatttcggacaggaacgatatgtaccgcaacgagcaggtatgcaagaagctgaaagccaaacacgggctttattttgctggtgggaaagaacaggtaaagcagcaccgcttgaaagagccggacaaatcgaaatacgagatttacaacgctgtaaagaatgaaatcggcaaatcccgaaactggcagcagttacaggggcggttagcggaaaagggtattactatccggttcaagtacaaagggcagacaaacgaagtgcagggcatatccttttccaaaggtgaatacacgttcaagggttcggagatagaccgcagtttcagtttctccaaactggataaatgtttcggggatgcaggactgaacgctgccggaaacaaccggcagacagttttcgtacctgttcaggagccagcgcagacaccgggcaaagccgacagtccgttactggcaggcttgggcggtctgttctccgcttcatcctctccggctgatgaaatgcccgatgattcctttttgagaaagaagaagaaaaaaaagaaaaaacaactaaagttataagcgtatggaggaaaatttgattttagaggggcttctctcaatggttactgaactgaaagagaagcaggaagcacaggtaacgccagccagtcgggaggaaactcttgaaaggctgaacgcaatcgaacaggcattgtcggaactacacagcaaccctgctgttcccgaaaaggatttgcaggctatccgaagccagcttgacgatataaggaacaggatgcagggtcagcagaaacatatcgaggacaccaagaaaatagtattggaaacctaccgttgtttcaaggtaatgcttgatacttttggctcttgcaagacggataaagaggaagctgcacccttaccgctctatcaacggatttacaacaaggtcgcttcttggattcgtccgggattgttccttttttcggcagtgctggttatctgttccgtttccatattcttgaatgtccgtttggctgaacgtatgcagcagttgcaggacaacgatataaaataccgctatttgctgatgcaaggacaggcagacggggaaacttttgatatgctggaaaacaagttcaagtggcaacgggataacagttttatccgaagtctgaccgattcagtgatggattttgaataccgcatccaaaagcaggcggaagcactggagcgtgcaagactgttgaacgagcaagccgaacagctaaagaaagaagccgataagttgggcaagccataagcaaggaaagccggaacaaatgatgaagcacattcaccgttccggctttttagatttacttctttttcttcgtacagtgttctttctcgaactggcgtagcgtggtaatactgaacctttctttgatgaactcccttacatcggaagccttgtaatacacttttccgctgatagtgaagtacggcagcgcaccgatagcccggtagcgttgcagggttttgatactaactttgaacaacaggcataagtcctgattatccagcaggttatcatcttcgggcagtaccctgtctgcattgcgtagtacccgtacatccttacaaagttcttccagtttggcgtacagcttctgcatccattcaccaaattcgtcattctctatatacataattgcttcatgtttcaggttatacattcttatttgtcaatcgattgatgaagcaaagttctaaaaatggatgcaaagaaattataggggaactaatggaatcccctataaataaaccataagttgctgattatctatatcctttcttgtcatgttcttttcggataaggtcagccagtccattaagaaattcggtgagtttgcccggttttcgttttatcacgtcctcatgcttttggtgacagtcgcttatcttgatgttaaacaaccactcaaaacctttggataaatccaccaaataggcaggctttccattctgataaacgatgtctttggagaggaacagaccgcttaccatttccatgatgttgataagggttgtcttgtcagcgagaaatagaggggaaagagattgcttattagtacgttgttgtagctgttccgggtacttgatacgccattcgataaggcgtatttcagtgtttaaaagtcctatcgcttcatcaactaaatgcaaatagggtatttttttcttgctcaaaccgtacacgatacgatttaagacgatacaagccaaaagaaaaataacgtagtaatacgccataattttgttcgttgatacagaaattggctacatgaatagccaattcttcaatagcttcttccaattcggatgcagaaactttacgctgtgagtattccgataataatcggaaaagtctctgttgtaatatgtgcttattgttcattgtatatatatttctaatttaagaactatctatctaaaagaatattattttcagaaagagataaaacttaatcttcaactttttcattataatactttagaaaattaatttcacctatatcttttaaaagtttttgattttcaataaagtcctgtccatattttagccaacttttggtgaatcttctaagtttggcacatggaaaatcagaacattgaaaacaatgtgttatttcttttcccaagcagcacaaatgaaatgttttacatttttcgcatcgagagttactcagttctgctcctttgcaggggcttttttctcttgtatatgcagggcaaccaccacaaaatacaccacaagcaggaatacgaccgttataagatttcatttgctgagtttctttgccatccaaaaattggtgagagaaagcatatttgctttccgtttttgttcttcctctactatatagcctcttttttcaaagaatgagcgggctgttaaacttacttctgatgtaatccgtataagtcctgttgcagttgcataccgttctatttcatttagaagtatcgtagcaatacctttaccttgaaaatctttatgaacaaacatagaatgcaaatagccttgtagagtaatggatgcaaagccgacaatttgtgactgttgattagtggctacaataaaataatgtgttttaatcattccttttatatgggaaaggtcgtttccacacgatgcccaatcttccacttctgcttttgaataatcacgcttgtttatattgaggactgtatcttgaaataaatctttgatttcaagggcatcagacggttgggcaattctaattgtaaaatctttatccatgtattgtaaaattagtcatttgtttatatgccttttatcataggaatactttttttgtagttccctaaagatacgttccaaatcatatccatgcggattggaaatttggaaacatccgctttctatggggctattaacctgaggggcagttatcaccgtgtccttgaaaacgaaagcaatgtactttcctacactctttgttgtggcttctctccatataggcaatttatcttggaggaagacaccggtaatgaccgagcgtccaaaagcatcagtttccaaacgtaaagtatcgaaatccttaacagtaaggaaaggtgtttgtgaaaggctgtctgtagtctgtgatgttacgtagtaccagccgtttatccggtgaaaggattttgtctgtatacaagctgtcattagtaggcagaaaaagagaattgttgaaatcttcatatccgctatttttaggttaatacatcttctccaacgtccacaccatcttattgggattataggcttccattacgaggtgtgttcctgtgtattccagcactgtccacggacctgctatgttgtcgaacgtgatgatttttccatttacttgataagtaaaatctgtgttccacatatatccgtcttcttcgttcgtccttgtataaatgccttctgattcgttggtaaactgaagaatggattgttttgtgtactctatctcatcttcgatattgtacacggtcatttgcgcttgccaagtagtttgcttcagggcttcgggggtgaagacagaagtaggggcatcatcgttactacaatttgtcagacataacatggcgcaaataatgaatgtggaaagcaccatacataaagtaattttctttttcatcttatctctattttaagtgattgacaataattatatatttctcttcatagggatactaacaatacctttattaatctctttttcacccacttttttgaagcctaaagatgtataaaaagtttctgcataggttgaagaattaactgttatataagtgaaattacaattgctcatcatataatcaaatagcgatttccctattctttgccgatgatagtgtggcaagacaaagaagagggatatatgttgcctttcctgatgtacaccgattattcctatcaataaatgattgtcaaaagcaccatatatgtcaagtgtattcatcaacgatgtgtcatacacgaaacttttaaaggtttcaataccttcttgggtgaaatcattcctgccacattccatatatacttgataggacaaatcagccgcattattatattcttcttgtgttaatttacgtatcataatattcatatcctaaaatcagctcttagcaattcataataatggcaatctaaaaattttccatttttgaaataggcattacaatgtatgccacatttacgaaagcctattttctctaatactctcattgatgatatattaccagcataaacatttgcataaatacgtatcacatctgtatgggaaaaatagctactaatagcaagtactaatatttgagtcataatccctttaccccaataaggttcggcaagccaataccctaattcagcattgtagcgttccacgtcaatgccacgagcgaaacttatattacctgctgcttcctgatttacttcgacacaataattattttgttcgttttgatttgaaacgaactggatgaactgttgcgcatcgttttcagaataaggatatggtaggctatcacggcaattatcccatatctttttattattaagatatttagctaaagcagggaagtcttctttagcccaatttcttattttatatttatctacatccatttctttatccaatttatttaccattataaatttgctgcatgaaatatattgtggctatggaaaacctcatgcgaaaagtaattttcttcttcatattgttgctgttttaagtgattgaacattgatttcttaaaatggcaaagaacggaagaataaagaaaaaaggtcttgacaattgtcaagaccccggtataatggatgttaaaagattggctatttctccagtttgcggcgtatgcgactaactgtttcaggagtaatccctaaaaaagaagctatacttttcaagggtacagtatctttaaggtcaggacaacgtttcattagtttttgatatcgtatttcaggtgtacaatacgaatcgagcaatcgttcatacaccatttcatatagattttcagctacatatcttcctaatcgttgagtttccatattcgtttcccaacattctataatatcatggcgtgatatttcataaacagaacagtctgttaacgcttgaatgctcactgctgacagacaacttttcataaaagaagaatagtcacatacaaattcatcggtaaaagcatatcccacaatgtgctcttctccttcttcgtcaatatgcgtatattgaaatgtgccatgttttacccatccagcaaaacgttccacctcattttgccggataaagaaatctttcttatggtaagtacgcaatatcccttttctcgcaaataaatcttttacaagggaatagtccaaattgttgagatatgagttaaattctttcattattgtaagctatttgttcaatttgcgccgtatgcgactgacagtctcaggagtaactcctaagaatgaagcgatttccttcagtgttatgtactcttgaatatcggggcatttgttcaataagtcaagatacaattcttctgtagtcttacagtacatatccaataatctatgatacattaataagtatgattgttcaacaagagtacactttatttgcatggtttcagcatttgtggcaaagaaatgctccacctttgagtagagtatataacaaatcgttgtatcgcaaacagcttcaattgtaactaatgacggttgctcaggttctataagtgtacataaacttcccgtaaattctccggagaaagtatatcctactatgtgtatgtttcctttttcatccacacgagtatatctcaataagccgtgttcaatataagctccccgatgattcactttgccttgaatagtgaatcgttcgccctttttgagttcgatataagtaccatgttccaaaatgaacagctttagctgttctaatttcgaatggttggcatattgtgagttaaaatcttccatactataaactaattacaattgaaatatagaataacttcgtgagttgctctcttaaaaaagaaaaatagattccttactttatcaaaacatcttcctcctttttataaatctactttattgtgagtttagtttgtgcttttgtatatatatccaaaacgaactaaacttatttctattgactgaaagtatatgctggcgaaagaagaaataacctttttcttttcgccaattttaaagtttgtaactctcatagtttgaggaagaaatgaactcttttatttcttcttctgttggaagctctatcctatacttctgtacaaagatatttgggtctaatccggctgtggcatactttactaatgtatctcccttttcagtgcaaagcagaataccgataggtggattatcatccggctgcatcacttccgctttgaaatagttcagatacatatttagttgcgaagcatactcatggtggaacttgtctatcttcaattcatatgttgcgtagccatttatgttggcttctaactctaatcctttgtatataaacaatctcttcattttctacacaacataaatttagctgcaaaagaagctaaaagtctccatttgaccaaacttacttgctctaaaaagcatataactcgccttaattcttcatatttaggaaacagcctaagtattaactttaaaaagaagaattatgcttgaaacaatcattcgacgcaaatggtacttgcaaaagcacctcgacgctcctttattgaaggaacgtgaaaactatcttgctttcatggctgaaaagcgcaactacagccataattatctgctttctttggcagattatctactactgatagtcacaagcctcaagcttgaagatggcttctctgaacaggtccctatcagtagcatcaaggacgccgccatcacatggtcaaagacaaaaaagaaccatccgatgaagagaaaggacaacagtcccagcagtgttcgaaaatatatggatattgctttttcatggcttgcctacataggcaagttagatggcatctatacaaataatgctattattttgaaccgcctttttacccgtaaacatcataagttacgttatctcacctatcctttgttaaaagaacgggctgagtatcttcaaatatgggaagacaaaggtgcggctacacaaacactacgggatatagccgcataccaacttcatttaattgactatctgcatgttgaggacagacgcatggtcagtattgaggatatccgagaatccgctgacagttggatgactgtacagaagcccggtgtaagagatgcatccgggatatacgcaagaagacgttttatatcatatactaccagttggttgtcttatatgggtcagcttatatgtgaagatgatgcgtttccctttaaagaacatgtgatggaatatcttgattggctgaaacaaaacaaaggctattcttcaagcaccaccgaaggcagatacagtcagctcaaaacgatgatgctgaacttaaaagtcgacggattgaaagatataacgtcttcagttcttgatgactatatacgtaagagacatgatgaggacggttgtaacagaagaacgatagccgataccgtcactgtccttcgtggatttttcagatacgcagaagaaaaaggtctgtgtaatcccggacttgtgtatagcttaaaagccccgagagtatatgcccatgaaaacctgccttcgtttgtcccttgggagacagttcaagatatcctgcaatccaaaaaggatgccgccgggacaggtgtcagggattatgccatattgcttcttttgactgtctatggccttcgttgcagtgaggtgacaaacatgaagttgaaagatatagactggcggaatgaaacgctgtatttaagacgggccaagaactgcaggccacaagtgctacctttgcttcccatcgttggcgatgccattatcagatacatcaaagaggcacgctttaataaaagcggaaacgaatacctctttttatgcagacgtgcccctcatgaacagctttccacttcgactatatacaagctggtcagggacgagctgaaaggcaaaggactggagttgcgtcattacgggccgcacagcctgcgtcatacttgtgccacacgccttatcaacaccgggcattccttgaaagaaatcgcagatttgctggggcacatcgggcttgataccacacgcatatatgccaaagtcgacattaagaacttacgtaaggttgctgatatggattgggagggcttgctatgaaactgaatgaaatgacagaactttatataagttacagacgggctttgggagaaaagttcaagacaaacgcgcaagcattgcgttcttttatgaagcatatcggtggcgatacgaatccggcggaactgactgtaggacaggtcgaaccctatttatattatcccacaggaacggtcactgccggctggttcataaggcacacagccttaaagggcatgttccaatgggccatgtcacggggtataatgaacaatgtaccccttcccgcagacttgcccaagcgtttggagcacatgacaccttatatttatagcaaaccggaactgcaacggttgttccgctcagccatggaatatcagaaaaaccggagtaaaatccatcctgaatgcatgaggatgatactgcaactgacctattttcttggattgaggctccacgaaacgatgtctttgagaataagagacctgaaccaaccggatttgtatgtgcatatacgagaatcgaaattttacaagtcacggattgtcacatacaaccataaggttggagagttgattgatacttttttgaaatggagagagaaacaaggcatgtgctgcgtacccgaaagcaaactctttttagataagaaaggcttggacatgcatatagacaccgtgagaggtgcttttgaaagaatcagggaacatgccggtatctcccgttcggataaatcccccttccagccaagattacatgacctgaggcacaccttcgccgtccatcggcttacttcatggtatagggagaatcaggacgtccaacagttgctccctgtgttgagcacatatcttggacatacacatttatcccatacgtcagtctacctgaccatgaccgatggactgctgggagaagcaaacaaccgttttgaatcatacataaaacaaggaaaagatgaatgaagaaaataagttttatgccggatactggatacgaaggtttctttgtgaatatctgacaaatatacgtaacctgtctgccaatacgcttaaatcgtaccgggatgcgatcagattgctgatgccttttattgccaagtgtgtgaaaaaagaagtggacaagatactccttactgatattacagataccagggttgccgacttcctggaaagtcttgaaaaagacaggtcatgttcaatcaagaccagaaatatcagactggctgctttttgttctcttgcaaagtatgtatccgccaacagtccggagcatatagaatggagtcgaaatataagaaacatacctgtcaagaagaccaggaggactttgataacgtaccttgaaaaagaggaaatgaatgcactactggacgcaccagataaaagtacaagccaagggtggagagattatgccctcttactttttttgtataatacgggagcgcgggcagaagaagctgctactttattgataagggatttatccctacccaagaaaaagggcttggctgtagtgactataacgggcaagggaaataaaacaagaagatgtccattatggcaacatacccgtgaggcactatcttccattatcaaaaacagaacagaggatgaccatgtctttttaaaccgagttggacaaccaataacccgctttggcatctatgagatggtaacccgttatgcagaaaagatagaagataagatgcctacaattaaaaagaaacgcgtcagtccgcatacaatcagacatacaaccgcaacccatctactccaatcaggtgttgatatcaatactatcagagcttggcttgggcatgtatccattaatacgaccaatatttatgctgaagttaatatggaaatgaaggcgaaagcgttgtcaaattgtgaaatagagaagaagtataaagtgaaaagccattggaaggacgataaaaaactaatggattttttggatagtctgtgatattatgccaactttgcgtagaaatttatgttgtgtagaaaatgaagagattgtttatacctcaaatccgcaactacgcgcctaatatgatacagaagcgaaaagaatctgcatcgttagtaaaaagggggcacagtgcatcgaatgtcaccataaagacatataaatgccccttaccccaccatgcgacttgaggcaatacgcaaaatcacgactataagttgtcggtgttatccaaagtcattctggaacacattggcataagcattgttgcatgaatagatattcagcacatacttccttgatgtcctgacccatttggctggcacagagatgaacttaaagacaaacgtcttgatgcggcttgttgctttgagtccgaacctcttcacgtcaagcctcgccatgatgaatttatagaagttgcgtatgagtgccataagcagaagaaacaccgtgttttctcccataaaggattttggaagcctgttccagccgaatccgttattcatatcatcgaagatgcgttccttccctccacggaggttatagaattcgacaatctctttctcggaagactcgtagtcatttgtaaggatgcagcggtaggtgtattctccttcccacaggtcgagttcgccgtctatccgcttctgtctttgaatcacaagacggtatgccttccctttccatttctcgatgagaatggaggccagctcaaactcaatgccgcccaattccactttcttccaacctctgagggcaaagatgtcattgtagagcgaactgcatcggttagcacggatatagaaggtcttgcagtgtttagcaatctcttccactatctcttcagaacacgagccgcaatcagctctgaaacggttgataataagcttgttttgttcaaacctttcaaagaacctcttcagcgtgtccttctggtggaaacggacatttgtgttgccgtcgctgttctcaatgccgacaatcaagttgccaataaccgccacgccagggcgataaccaaggaacttcttgtatgtaggcttcgcatcaaacttctcagcctctatgaactggtggtcgaagtcaacgtcatacccctcgccctctttcagctgccctgtggacaataggcaattgaggagcagtgtattcagcttgtctgccgtgttgaagtcgtaggtcttgccagtgtcggatgtgtaggaaatgttatcctgggtcagttcctttatggctctaagaatcgtgtcggcactgcatgtgcgaagtgtcggatgaagcgaaaggtggtacatcagatgagtggtgacatcctcgatgcatgagccgccacaaaaataaacgctcataagcgaacggatgatttcgctgtattgataaccatacagcctgcatctcataccgagggttgagtcgattacagatgagagtctggagtcaaattgctccattattgaaaatattcctccaaaaggagtgagtttctcggatttaattgctacctttgccatgtctgtcgggtttgatacatattttgatttgcaacactaagataggtgaaaaatctgacatggcaaattcctgagcaactttttgttgctcaggtacttaaaaagttatatttgtaatagtgttgcggaattaaggttatatacaaaggattagagttggaagccaacataaatggctacgcaacatatgaattgttatgttgtgcacaacataataattctacaataacatgacatttcaaaatacggtgatagaacacaaggtcggcaaagaaataatcttcatcaatcaagatgcgtttttgccgggcttcaaagcagaagccatgtcccatttctaacaggaagtgttgcaggttgtcaagaatggattgttccaaatcgttttccgtcactaatgcacgttcattcaaccctaagaattccaaagtaacaggggtattgataacatctttaggttgtaataaggttgcttgttgctggactaaagcggagagggcttctttgtttttggatagtccgctacgttcgtaatataaagatgcgatttgtcgctccaactcctttacagaccagcaaccacgaatggtttccatttcatagaaagcacgttttaccgggttctcaattcccgatatagtgtttaaatgggtggaagataatctattgaataatctatcagccggaatcatccatgtttcggtttgcgggtattctgttgatagtttccaaactccattttcagattcggcggtcaccaaccgccgaattggttcagtgaattcggcggtcaatgactgccgaatttgaatttgtgatgcaatgtattgtgtaacaggctcttttagttgtggataaacaaggtacagccgcctaaattcacggaatctacgttcattcagaccttttgttttcagtcgttgttccagcttcttcaacagttgttcaccgtaggcggcacggtcttctccgttctgctcaaattctacaatatagcaacccataagccagttacgggaagtaagggcaaggtttacagcgtgtgcggcttgtgcctgcaacgtgttctgtatcgtgctgatatgttttactaatgcttcaaagttcatagttacaaagataagtcttttatggttaaaactttagttcaggtaagctgtttattgcttcctcttttaatttatccaccgcacgggtgtacttctccgtatgcttcaatccgctatgccctaaaaggctggctacggttttgatattagccccattgttcagaatgttcacggcaaacgaatgccgggcacaatgccagcttatatgtttgtctattccggctctctttacccaacgctttactgatttacagcaactttcgtaagtaggtaaatcgaatatcaagcagtttttatctgccggggcttcaccaatgatagacaatagaccgtcattcagaggaataaccacaccactactggcagaatgtccctttgtcttgctttgctcaaacttcaataaccgattagcgtaatccacattcttataggtaaggtcttttacatcacagaaacgcaaaccactgtataagcagaagataaaagcccgtctgacattcgggttctcgttgtcataatggcaagccgccaacttttggatttcttcgggagagagaacatctttccgaagcatttggctatccactttgcagataacacttttgcatgggtctttcaacattacatcgtggtcaatcgcatatcgaataactttcttgaaacgctggtaaatgcttttagcaccctcacccacacttcgggattgcaaataggctacaaactgctccatcatttctttggtgataagttccggtttgatactaaactcattcatggggtattgctcttttaagaagtccttaaaacggctaagcgcaatttgtaccatgcgaatatctttcttggtataactgttgatataggcttggaaatagtctaagaaattgaccattctatctttttttaaccgataacccaacatgctttctttaaattcctgctcacgctctgcacgtatctttgtggcaagctccaacgtttctttgttctgctggcgttccgcaggggtacggggtttatctatcagatacagactaaggttttcttttcgcctgttgtgctttactgcaaacttgggcttaccttgcatctttccactatcatagtacacttgattgccgttttcatctaatacgggcttttcctctctacctaaataatactctaagtaaaggctgattctaccatccgagagcttattttgctctaacttggggttttctttcgttttattttctaactttgccattgtttagaggttttatcccgatttaggtaccataaccgggtgattacgctaaatagttgattttcttttgttttccgatattgcaaaggtacaaaagaaaatgatatttcaaagtgtactaaaagtgtactgaataacggaaaatgggcaaaatatggcaaaaatagagaaaataggaaatattcaaatagttgataataaggaagataaatccttttattttcctatgatttctatggtttgtaccgggtctgggtactgaggcggagaaagttgaaaaactctctccgcttttcttttctactcctcgtaactcattggtttgctgggctcaacgtccaataccggatcaacgtaagaatctgagggattttcattttatgcatataatttagcgagtctatacaagaaaaatgctttatctcttactcctctgaactgtgccctgaacgctttgattttagcattaaatgattctgctgctgcattggtagcccttctttcaaagaagtttattatattcagatagtgcgtttgtatcgagcgcgctacccttccaaaggtgagaaaccccgctttgtctacttcatcataccaccttgcaagccttgtcaaagctatatctttaaacttacactgatgatagattgatcctaaccgcatggccatataatatcctttctttatatcgggatattctttaaatagaatctcggcccgtatcctttgagactgagtccatagagattcttttttgtaaagcagataaatactccttgccagcaactgttttcttgtatctccattggcgaaaacgggcgcatgatacatctttccgcaggtcttggcgtaagctatctgtatggactcttcgtccaaagcctcccagcgagctttcacccgcatctcctgaaccgcttcatacgctaatttctgtacatggaaacgatccgtaacccgtttggcagcagggaagcaagtccgggcaatctgttccatattgggagccatatccaatgttatctcacgcacctggtagcggcgacgacgcgaaagtttaagcaggacagaggtaaccgtgcaaacatccgtacctttaatgataccaataatactgcctttaccaccgtgagtctctttattaatcaacactgtatagagttctccacgggaaagagccacttcgtcaatacagacgtaggcaccaatgttcttctcaaacaggagccagttctctgcgtgagcaagctgatcccagtgtaggtaattacttaaatggttgcggtattgacgttccaacaaatccccgtcaacgccatataaagtacccaataacttgcaactgatcggataattatcaatatagttcttttaaaaaagacgcaaagtcttgcgtcaaacgagtaccctcagccaccatacgccaattgcgggaaatatactcattgctgcttttcaaaatccaacggcgacgacggaggttcaaaaagactttcttgccacgaagaggaaagtcttgaacaacaacaggctcataaaaccctttactctctgtttcttgaccagcatacttctcggggagctgattcttctcctcaaggtaaatgataacttcattcatgctttccttcacatcaacaagatcaaagtaatccaaagttccttcaggaagaagaaggtgataaccatttaacttcataagctattaatttggagacaaagataacaatttatatatttaaccctcagggttattcattgatccccaataccttccaattgcaacctgcataagctactacgagtcatcttccccgaagttttaatggagtatttcgagatctcctgttggcatgacgacttcatgaaaaacactacctggaacgttcagattacaagagtggaactgtgatttcacatggttttactgatgagaaagtgattcagaactttcctctgcatggcaaacctgtttatctccacgtaagacgtcgtcgctggtgtggcaaagctacagggaaaacgttttcttgttagataaataatgtgaaaactgtattttttctttggaatagaattaactttcagccacttataaggtctaacatatattattcatttaatattatgttagaattatgagaaagcaaattttaagtttacttgttgtgttgttaatcggctcaacagtatgtatggctcaggatcgtcaaaaaggaaaagttgacagagagaagcgtatcgaacagataataaccgatctgggactgaatgaaaagcaagccaaggattttaaggctgcaatggaagaaatgcgaccgacaaagagaaattctaatgaaagaccttcgcgcgaagagatgcaaaagaagagaaaagagggagaagctaaaataaagagtatcctgactgatgaacaatataagaaatatcaggatatgcgtaaaaaggaaaatgtagatagaaagaaaagaactaaataagaaagtatttcttttttactctttttagctagttttattggcctgttatcgtttctcgtatgtgtttggttatcgtgactttagaggagatgataggctattaagtatttataaaggtattatttatatagatataaagcaggtttttgctggctgatattcataaattttatccaaaagaaggaaaaagaatagaataaacaagaagcaacgtaacaccctatccataaaaatgctatatttattgcagctggagagcactttaagtaatgcttaagaggaaagacgcaaagtagtatatatactatatattttctattattaattacttaaacacatttttatggaagccaagaaatcaaaaaaggctacaatcgagaatcaacggggttcttggttgttgatgggtttggttgttgcgcttgccttcatgttcgtttcgttcgaatggacacaacatgatgtcagggttgcagcactatcatcagatgatgaatccatctttgttacagagttagttccgatcacattcccagatgagaaactggaaccgcctccacctcccgaaaataagatcgtagaaatattagaaatagtaaagaacgatatagaggtagcggataatgtttctacagttggagaggatatggatgcaactcataagattgtctggataccgccagtggtggaaacggaagtggttgatgaagacgttattgttgatgttgcagaaatcatgcctgagtttcccggaggtacggctgctttgatgaaatatttgggtacaaatatcaagtatccgactatttctcaggaaatgggttcagcgggaagagtgattgtccaatttgttgttgacaaagatggatcaatttcaaatcccgaagtggtacgaggggtagatgcatatttggataaagaagctatccgtgtgataagttctatgccaaaatggaggcccggagtacagaatggtaagaaagttcgagtaaaatataccgttcctgtagtattcaggttacagtagttgcttgaaatagatgtgtaatgcgggccggttccgaaagggatcggcccttttttattgaaatccgacattctcaatcgcaggatacttataacatttcttttccggattgcttctatgaaataaaaaaacatatctttgcaagaagaataaaaacaaatgttgattttatgaatcttctactttgtcttaaaagaccctttatctggctttcccgcttccgttaccgttgcggatatggtgtacattctccgtttgcatttagtctgataacggatgtgatatatgaaaagatgccttattatgcttatgattctttggagaaagaacagaagaaaatcgtagaggagcgtgggtgtaataaaggtacacagaaggtaaatcgtttcttgttccggctggtgaataaagtgcaacctgctactattgtagaggtaggtcgtccttcggtgacctcactttatcttcaatcggcgaaaccttctgcggaatatctttttgcctctgacttgtcggaactgtttctggatacggacgttccggtagattttctatatctgaacgattatcagaatccgtgtttgctggaggaagtctttcgggtttgtgtacgccggaccaccttgaaaagtgtgtttgtcgtgcatggaatctgttattctaaagaaatgcgggcattctggaaaagattgcaggctgacgaacgggtaggcattaccttcgacctgtacgatataggcttgctcttttttgataaaacaaagataaaacaacattatatcgtcaacttctgagaacctttgtacgtttaccttatatagatcaataaattggaagattatgaaaaggagccttgtatatacaaaaaccggagataagggaacaacaagtcttgttggtggtagtcgtgttccgaagacccacattcgtttggaagcttatggaacagtggacgagcttaattccaacttgggattactgaatacttatttgcaaaatgagactgacaggaactttattttgggcatacaacataagttatttgctatcgggtcgcatttggctaccgatcaggaaaaaacacaactgaaagccgccagtatcatttcaatggaagatgtggaacgtatcgagcgggagattgataaactggatgaacaattaccggaactttgtgcgtttattattcctggaggaagtcgtggagcggccatctgccatgtttgtcgtaccgtttgccggagagtagaaagacgcattctggctttgtccgaaacttgtacaatttcccctgaagtactagcttttgtcaacagattatcagattatttgtttgttttatctcggaaaatgaattttgatgaacaaaataatgaaatattttgggataatagttggaaatgatagattttattatacttttgccgaaaatatagaaaataagacagattagtattcactttaaatactcaagattatgtattggacattggaactagcatcaaaacttgaagatgctccctggccggcaaccaaggacgaattgattgattatgccatgcgttcgggtgctcctcttgaagttattgagaatctccaagagatggaagatgagggcgagatctatgagagtatcgaagatatttggccggattaccctagtaaggaggattttttctttaacgaggaagagtattaatttataaatgaccgaacatataaaattctcgataacttgtgataaagttatcgggaattttttattgatgaacatcgtttttggtatttctattttctaactcgtctcagaatattctgcatttcgtagactatttcggggtgttggtccgcaaggttttccttttcatattctctaactctcatgtcataaagttgaggagttttcaaatttccagtctctacttttgggccccaggtaatcatggcaggtccatcgtttggttcaatatatttccaatttttggtacgtacagacatggttgaagattcttctataatccatgggcgatccgtttgatcctttccgagccatgtgtttaagcggttctggctatctggcgcacttccttttggtaattttgcattgattagagcagccattgatgcaaaccagtcgatttgtgatactaaggcgtcggaaatttgtgaaccgggtatttctttcggccaactgacaattgcaggtaccgccgttcctccttcaaatgcgctgtatttattaccacgaaaaggacctgcaggactatgtccgttaagcaattcctcagcatggtcatcataaccgtcgtcaactaccggaccattgtcactagagaggataattaatgtgttttctcgtaatccccgttcttcaagagctgctattatttgtcccactgtccagtcaaactgggcaatagcatcaccacgtactcccattttattcttacctctaaaacgttcatgcggaaaacgtggtacatgtacgtcgtttgtagcaaaatacaagaaaaaaggctggtttttgtacttgtcgataaaatcaatagcatgtgcggtgatggagtcggctatattttcatctttccataatgctttgccaccacctttcatgtatcctatgcgaccaattccgttgacaatagccatgtcgtgcccatgactatgtttcatattgtacaacagttccggatggtctttccctaatggttcgccagggaatggcttttgataactaacctcaataggagcagaagggtcgtagttggctactttaccgttttcaataaacacgcatggtacgcgatccgctgtggctgccataatataggaataatcaaatcccaagtctcccagtgctgtaggtagtggagcattccagtcttgcatgcccgatttgtcacccaatcctaaatgccatttgccgatagcgccggtgatatatccggaattcttaaaaacatctgccagcgtgtaagtttcaggtcggataatcataccagcattacctgctgccacaccggttcccggtacacgccacgcatattttccagtgagcatggagtaacgtgaaggagtacttgttgccgcagtggcgtgcgcattggtgaattggacaccactttctgccaattggtttacatggggagtttgtacgtttttggctccatagcattcgaggtcaccatatcccagatcatctgcatagataaaaatgacgtttggctgcttttgaggatttgttttggttttgagcttttcgctttgtgccggacctgtaaccgccaataggcttgcaactggcgaaagaaaagctaataatgcatactgtttcatgggtatatttatttataggttttaaggtaacttatacctttgtgtcttattaataaatacgtatatttttagcccagcactatatcaaacccagttaaaactagttaaaacgcagaatgtctcttatggtatcgtaatgaagaaaataaataggttcaaattcttttttatgaattttaaagcaaagtagatattacgttctaccgccttctcgctaatgtcaagttgttctgctatttctttgtttgtcatttgttgtttcctgctcatgataaaaacctcttgttgtcgtggtggaagtaaagaaactaatttccatatatattccagtagatccttaacttcgagcgtctcatcagatatagcaattttctcagcaacctcaagagcagtaattttcatcgttaccttattcagacttttgcggaagtaatcaaaaattgtgttacgagtcataataaagagtaatccgtctatgtctttgttttcgttgattgatgcacgcgattcccataatttgataaaaacctcttgtactgcctcttttatttcctcgtcgtcattcagataaatctctgaaaatctgtatactttccgccaataatgatcatatacaaaggtaaatgaggtttcgtctccttgttttaattttgctaaaacagatgttttctccattacgtgcataattataattgttttgcaaagataagaaaaaaaggactggttagcgttctaaagaactgctttctgatttttcgaaaaaaagttcaatgcaatgtagggatagacataaaagtttcgtatttaatattagagacgcttgttttataatgaaaatgaaaaatgtgaaaaagatagatatgaataagaaactatatgaacaaatcaaagctttattagcagacaaactggatgaaaaagaacaaaaggaactatttcatcatcgagagtttgaagaaagaatgcacctgcaatggaatatggatcgacaaaaagaacttgacgatgaagtagggcgaaagatgtggaaaatggtaagacagaaatgtctggattgccgacaacagaaaaagcatgtttatataccatattggctatctgtggctgccgtagctcttgttttgctacttggagcaacttggatgtatttctccggaaataaggtaaatgaggcgaaagatgcttttgtagaagttgtatcaaaagaagggcgtctatatatgctgcctgatagttcacgagtttggatgcatccgggaagttctatccgttatccggagaattttgttcagaatagaaaagtgtggttgaaaggaaattcccattttgatgtttataaacaggatggcaaacattttatcgtatacattgatagggcttttgtagaagtaaaaggtacttcttttttaattaatcaggaacaggcaaatatttctaaagtcactttgtttagtggtaaagtcgattttacgatagtaggtactgagcatactattgagatgaaaccttcgcaagaattgaccttcaacgcggagaaggcaagcgtgaaagtggatgaaatgcaaggagtgaaatggaaagatggtaattatgaatttacaaatgttgatttaagttcatggattgagattgtaggaagaatatataatgtaaaaatatcattggaacacggacaggcaaccaagaatctgttaaacgggcgtctacgttataatgagtcattggaagaagctattgaaaaaatgtgcttcagtacagggtggcgatatagaaaggaaaatggagaatatatcatattccgttaaaggtatactatagtatgtttgtataattttttaatgttaatcttttaattatttagtatggaagaaaagcaacagcatggcaggtggaagtacctcatgtgcatttggtttggaatcttttgtttcccattgattgcaatagcagcacagggagtcataaaggtgaaagggtattttagtgaagtacaagctatccgtcagatcgaaaaaaacagtaattatgtgtttttttacgatgcagcagatttggatgaagtaaagcgcaaaaacattgactgccaaggtacgattgaaaaagtattgtcagttgtatttgaagggagtaatgttaactatttagtccggggagacgaagttgtactgaaagtgaataaacagagtgtacagcagaaaggagagaaaagagtcgtcacaggtgtggttacagacgccatagacggcgagccgttggtaggtgtgaacattgttgtgaaaggtcagaaaagtggaactatcacggatttgaatggtagatattctatttctgtgagcggagacaaagccgtactggtcttctcgtacatcggttaccagaaacgtgaagctccggtagaagatttaggggtggttaatgtcacgatgtccggagaacagcagacgttgaacgaggtcgttgttgtaggttccggagtacaaaagaaagtgagtgtgacaggggctattacaaatgtgaaaggagatattttacgaatgccgacttcacaattaagtacttcgtttgccggtaagctggcaggtgtgattgctaccactaaaacaggagagccgggttccggggctgatttttatattcgcggtatttctacttttggcgggcgtacaacaccgcttatattattggacgatgtagaaatttcagtatctgatctgaactatgtgccggcggaaaatatcgagagtttctccatcttaaaagatgcttctgcaactgcaatttatggtgcacgcggtgcaaatggtgtaatgataatctctacaaagggaggtgattacaatatgaagacgaaggttaatgttagtgcggagaactctttcaatatcatgtccgattttcctgagtttgtagatggtcccagatatatggaactttacaatgaagctgacctgtcgagaaatccgaataaatcgaaagatcaattattgtattcggacagacggatccagttgacccgtgacggggtaaatccttatgtatatccgaatgtggattggcaggatgtcattttcaaaaagatgacaatgacgcagcgtgccaatatcaatgtatcgggaggaggtacaaaagtgaagtattatatgagcttgaatgtcagccacgatagtggtttgctgaatacggagaaagcttattcgtggaacaataatattaatatcatgaattatacgttccagaataatatctcctataagttgacccccacaacgacaatcaggatgaatatgaatgctcagatccgtcagaacaaagggcctaatatcaatagtgctgatttgtttaaaatgattctgacgactactccggtaactttccctgcaacttatcctgcgcaaccgggtgatacgtatatccgctatggatctgattatcagagttcggactatctctatcctaatccttatgcgcagatgatgacttcttataaggagcagaatgcgaatacattgaatacagtcattaaagtggagcaggattttgggtttgtaacaaaaggattgaaggcaaatatctgggtaaactttaaaaactggtccagcagttcctacaatcgttccattactccttatcttttcagagctgtgggatacagtgaagatagtccgttggaatatgacttggaacgtattcaggaaggtgcagactatatagcacagtcggatattgccagaagttcggatcagacatttgaatttcagggaaatatcagttataatcgtcaatttggtttgcacaatgtcggaggtatgttgatgtaccggcaaagggaatacagaagtgatgtgcttcctaatcgtaatcaaggagtctcaggacgtttcacatatgattacggacaacgttatctggctgaaatcaacttcggttataacggtacggaacgtcttgccaagaagaagcgtttcggtttcttcccggcaatgtctttaggatgggttatcagtaatgagaagttctttgaacctttgaaaaatgcggtgaataacctgaaagtgagagcctcttatggattggtaggtagcgatgatctggcacaagcgggcggaagctattatttatatattgataagctgacggataataaattggatcagataaagtggacatttggagagagtatgaatcacacattgggaggtccggagattgcctattatgcaaatctggatgctgtgtgggaaaaagcgaagaaatttgatattggcgtagatatgactttgtttgaccactggaatataacaatagactatttctatgacaaacgttacgatatatttatggaacgtcagtcttggcctaattctttgggttatggtaaagcaaaaccttggggaaatgtcggtaaaatggataataagggtgtggaattcagccttaattatcataagaatttctctaaagatttgggggctagttttcaggctaacctgacatataataaaaataagttggtttataaagacgaaccggattatcctactatttggaagtcggaaacaggaaaaccatattccagattgaccggatatatttcggaaggactgttccagagccaggaggagatagacaacagcccggaacagatggtaggaaatagcactccgaaggtcggtgatatcaaataccgtgatttgaatggtgatggaaaaataacggaagacgaccaatgtatgatttccaagtacggttctgttccacgtttgcaatatggtttcggtggtaccattaattataaaaaattcgactttggtattttcttcagtggttcggcattgcgttccattctgatcaatggtttggaccccttccttgaagggaatcgtataccgaataagaatgtgttgaaatttattgcagataatcactggtcggtagataatccgaatccgaatgccgaatatccgcgtttgggattgacgaccggtgatataggtaataatacggtcaacagtacttattggttgcgtaatggttctttcctgcgtctgaagaatctggaaatcggttataaaattccgtatgggcgtatttatgtcagtggtgcgaatctgcttcgtttcagcccgtttgatttgtgggatccggaattgagcagttggaatagctatccgttgcaacgtacggtcaatgtaggtttacaacttaatttctaataatctaaatcatagaagatatgaatattctgaaaaatatagttcgagtgggtctgattgtgactgctctttcatttaatttagtttcttgtgattatctggatgtagttccgcctgaacaagcagggctacaggatgccacaaagacccggaaaagtactttaggatttctgttcacttgttatgcaggacttcaggaagatgattctcctattggtcacacaagtgctcttaatggttccacagatgagtttgcactgccgatagaatggcggaacgatagtggagctttttgggatgattatgcatataatttagtctcggcagccaatccggatggactttggggtaattattataagtatattggtcaatgctatctttttttacgtcaggtcgaaaataatcccggtgaaaccttattgcaggaatggttaccgggtgaaaaagaacagtggttggccgaagctcattttttaattgcttattatcattttgcattactgagaaaatacggtcctatacctgttgttacggaatatgtacctcagagtactccctcttccgagtttggtggaagatgtcattatgattattgtgttaactggattgcatatcaacttgatctggcagcacagaatttgccgccgacccgtgagggaacagaatggggacgtgctacttctacgatggctaaagctttgaaagctcgtgtactgatgtatgctgcttctcctctttggaatggtcaattccctttttcttcatggaagaataaagtgaatactcccggggataaagatttttttgtaggtgatgatgctaaatataaagaatctatcggacgggatgattatggcattgaactggtaagcagcagttataatgagaaaaaatgggaaagagcgatggaggcctgtcagaaggcattggattttgcgcttaatgagggtggatgccgtctttatggaacggaagcttctgatatgacattgtatcagacagaactgggaaatagtgataagtggttaccttatgtgccgggaaaggaggataataatattcaggagaacagagagttcaaagaaagagtaatgatgcttcgttatatggttgcttcccgctatccgcataataaggaattaatctgggggctaaccggtaagaatattaattcaagaatacagggacgtataccggcgcatatattccaaacaggtaataagacttcttgggcagggggattttcagctatttctccgacgctatataccattgaacatttctatacggaagatggtgtgttgcctgaagaggccgcttcaacaggcgattttgcttcaagagcagaatggttccaaaaagcaggaatagcaggaaacaacagagaggatattattaaactttgtgtgaaccgtgaaccgcgtttttacgcatggatggcgttcgatggtggtgattacggttcaaagttgttgaaggccagcagtggcgatgcaggttcgccatgcgttttgaacatgaagactgctgcaggacatggatacgaccttaccagaagtccgcgtaactataatgttacaggatttatgacccagaaatatgtaaatccgacagctcaatttgtattcgatggtggagctttccaggctggagataccaaaccgatacctcttatacgtttggcagaattgtatctgaatctggcggaatgtcaggcgaacgtaggtggtgccaatctggcaaatgctttagccaacttgaaggaggttcgtgaccgtgccggtgttcccacgactacgactgtaccggaacagagtaaattaattgaaatgattcataatgagcgatttattgagttctggaatgaaggccatcgttatcatgatgtgcgccgttgggcggaaggtcagaaatactttggtgctaaacgtgaggggttgaacgcaatggtgaaagatgtaccgtttgaaaaatttaatgtaaggactactattgaccagcctttcagatggaacgaccgtttatatctggctcctattcagaatgccgaagtgtataaaaacccgcaaatggttcaggcatacggttactaattgtattatgaatttaaaaagcaaatttatgaagaaaagtttatttataccattattatgcggattgtcatttgtctatacggcatgtgatgaatatgatgatacatatccgaaagaatatcataagatcttgtctttgaagcaaaccggagaagaaagtaaaattctttataataccggtcaggatgcttcttttgatataacaatcatgaagaccggatgtgatccgtcattaacggctcaggctcaattgaccgtattgtcggatgaagcattaaaggaatacaatgaaaattatactattttgccttcaaatacctattctatagatggcagcgagttgatttttcagtccgatgagagatataaaatgtccaaagtggtgatgaaaacgagtgcaattcaagccttggtagaacttccggaaaatgctgataagacttttgtattgcccatttcactggttagtgctacggattctgtaaattctatgaataatctctatgtcatgaagcctgtgattaccactccgaagctggaatttaaagtctctgaggaagaatgtgtccaagggtttataaatagtacggatcctgttttattcactatacctatggggttagagatagacaaccaatgggatttcacggctaaggtagaagttgtgaataacgatggaaaggaaggatacttgtcttctagctcagtaacgctggaaaatgacggtctggtaacgtttgagccgggaaaagaagcttcattgaaggtgtcggtatcggcaggaagcggtgatgatttgacaaatctggttgtaggaggacgagtggctattaaaattaccgaaatagaaggaattaattttgattttgatagtcgggagtttaatctgacagtgacaggtaaagaatatgagtataataacaaagggttggatgcttctatgttgagtttcaatttccccgattttgtaggtaatacaactgctgcgagtttgtttgataaagatcctgcaacgtatgtgcagactccattccctaataggaactttgttaataccggcggcactaatccttatctccaattgcaacttccggaaggagttacagattttgccatctcatggacacagtgtttacaaaatgaagtctctttattgagaggatttgatgtactttggtctgttgatggtacatttgaggatattcctaatgctcgaaagtcatatagtgtggctgatttgagcgcggcaggtgcggttaacttgggagcttctttcacaacatcagcttgccattgtgataccccggttaagtttatacgtatagtacaaacttggaattgtgagagtaccactgatgcaggtggaaggtggcaattccgattggctgaacttaaactttacggagtatccattaaataagatatatatctgaaaaatagctttatccgttggttggtttgagtataaaaggattccggccaacggattttttatcagttaaatctaatattatttattatggtaaatttcttgaagacacactttggtaccatgttgacagtgctatgcgtcctattactttttactgcttgcagtgacgatgaagaggtgatagatccctttctaaaaacagacttgattggtgaaacaatcaatttgggttcggatgccgtagaagcatttgacgtgaaagtaataacgaaccggagagactgggaaattgcttctttaggagttgttcaatggtgtaattacgaaatcattccggatggagaaaatgctatcattcgtttttccgttgccgagaatgaggaagccacgcaacgtgagacagaataccggttaacggcaccgggttgccagcctttgaaaataaagattgttcaattaggaacagaatatgcgattctttttgatcagtccacccctaggaaagtgacacaggagggtgaagaatttttgttgactgtaacttctaatgtcgctaatgaacctacgatagaggctgatatggaaggctgggttgaaataatagaacaaccgatagtgacaagaactttttcagacaagatttttaaggttacagtacataagaacatcacgtttcagaatcgcacggggcatattaaatttgtctcaactgcgttaaaagaccccgtagtttttactatcattcaggagaaagcctccactgaaggtatgggtgatacgaaattgaaggtaaaaagcgcggaacttatagaaggcaatgtttacggcaatcaggatgtcagtaaaactattgatggagactattcgacaaattatagtagtgcctcactaggttcgccggaagccaatagaggacattctattatcattgaatatacattggaacagcccgaaaacataggttatgttcgtttgatgcaacgttcgaacaatgataaaaattctctttttgccagtggaggtgtttcggttttgaaagaaggcgaaactacttggaatgaggaaatcggttttgtagccgcacaaacggcgggagcggctgttgatattagtgttaatagccttcaagtgagtaaagtgcgtgtacgtatcgatcggatgacgcccggaattgataacgtcaatgtggctctggccgagtttgagtgttatcagtattcggataatacaaatgacattttggaagcgcaaaagttctttacggacgagacctattcggaattaaagggtacagtgacttcagaaagccttaaggagatcaagaccgccgttatttatcaattagcgaaagagttgctggaagggaaatacgataaaaaatttcgttttagtacctaccattcttgcaagagtcctgaaatagtggcagaagaactgactataggctcaagaagcatatatgataatccgacgggaatctattttacgcagggagagccggtgctggttttcgttatgtacaaaggagcaagcaataccccgctgagtcttgccattgccgattatagggaaggtggaaagaaaagcgtgatctccttgcggggaggtttgaatgtgattactccggcaaattcgggtaatggctatattcaatattggacgagagatgatgccggagatacagatgtcgatattcatttttgtttcggtaaacagattggctattgggatgtaagacgtggtgatacggatgccacttggccggaaatattggagagggctaagagaagtgcggtggatattccgaatgcgatgatggatattctgggacaaagagtacacttgcagaatacggtgaatgcctttgccaaatgtgcgccaaacgcaattcaggcagtagtcgatatgcacgaccgtatgttggattttgaatatctgatgatgggactggtgaaaaacaatgctgtgcctgctaaccgcttttttggcgtccgttcttggggaggaagtcctaattggaacggagtatgtgccaattatcccaacacggaagatgcgatgttggttccgaaggtcttttatagaaagaataatgtatgggttttcggacatgagtttgggcatggcaaccaggttgcccagatgaaaggcaatggttggacggaagtgaccaataatctttactgttcatttgctcagtatatgatgagaaacgatccgttgagtgaaggctatctgagactggaacatgaatccttcaagcgtccgggagcacgttcggctttggcgggcgggcgtataaatgctttcttgaacgaagctttggttgcccataaatcgtacttcatgcaagtggcaactatttccaccgacaaaccgggcgtatgggaatctgatccgtttgtgaaattaatccctttatggcaaatgactatgtattttatggcagcggatataaaacctgatttttggcctgatgtgcattgggcggctatccatgataatgacaagagttactctccggggcggaggtatgtgaatttcatgaaacgtgctattgacgcttcgggactgaatctttgcggattcttcgagggtatggggctgctgaaagtatttgataatgtgaaggtggatgactacacggttgctaccataaatataacgcaggaaatggtagatgaagtgaaagcttacggagaaggaaaaccattgccttcaggcggtatgcaatacatctcggccaacagcgtggaagcattcaagagcaaaagtaacgtagaaggaacatttaattccgggattaccaaaggaactgattatgtcacggtagaccatgctatatggaagaatgtagttgcttttgaaacatataaaggcaaagaactgactgatatttgtgtagtcggtactggtgacgtgactaataagacaactcgtgtggattatcctaccggagcgactcggattgaggcggtaggttgggatggaagtcggactttggtgaccggcagtagataaaaaagagaaaagccttcgatcaatcaggataataacttaacacatacactaatcgatcatatgagctactgttttaatattcaagtagagatgcggaaaagcattcttacttgaatattaaaacagagctctatttttagaatacaggcatttgccagatgaaccctactgaaacccggttggtactgtaattctcctgtcccagcaccttggcacgggaagtgaaatcgtaggaccgtcctacatacgtgacgaagaaatgcaggttggtttccattggataaaactcgataccggcaaggtatccccatgaagtgctgtaattccccttctctattccttcggacgccttcgtaaccgaagccgtttcatacatacctttcacgaaagcgttccatttcggcaggaaccggtaattacatttggcaactacggacagataacccgcatcgaatgcattatgtccgcccggacggccgacaatgttcgtgataatgcctttccggtcaatatcttcctttgaatacatgaagtcgacgaacgcgttccatttgccgagattcagctcgtttcccactgcataatagtacatattatgacttttggcttcgttcatgacggaagccgaccaacgggttttgaatacattattgaaattaccgttccagttcagcgtgtaaaccagcggcattttgcccgacttcaaatcggggatattcccttcggcgtcttccgtgattccgtacgtactgtcgaaagaactgttgcggctgttcaatatctgtaagttcagctgctgatcgggcgtgatattataaccgacattcaatcccgtcataaaattgctcatataatcaatcatgtcgcagtattggtagacatcaatcgggttcaggtcgaactcgaaaccaccgtatgcggcacattgttttccggcaaaaagactgaattggtcgtttaactgaattccgataccggcgtagtcgatagaagtcggcaggttgtcaatcatgctgttggcatcattcgagcggttgaggcgctggcggtaacggtatgacagccagttgttgatattccctttcgcttcgatgcggagctggtgcatattaaaatcaccttcctgaaatccatcccggaagtgggcgtcaaaactaccttgcatattcaggtataaattgaacttatccgtctttttctttacgttcgtcagttcttcgaacaggggagtatcgggggagaacttgtccttcttttccgcattttgcgcatacactcctcctatgctgcccgcaaggagcaacataaaaatcaaatttttcataagtcagtccggtttttagtattcgttaaagtactgttgaattagcttccagtccgtggtcttggtaagagcgagcatcaacaatacgcgcgacttttgcggattcaattcctgtgaagcgacaaactgatacttggcatcatccacttccgcgtcaagcgtggtaggacctgtcgggacacgtgaagaacgaaccaccaggataccttttctacgtgcgtcggtcagtaccgggaagatattcttgtggatatttccgtttcctactccggcatggatgattcctttgtatccgtgtgtcagtagcggagtcaccatatctgcctcgatgttggagtagctgtatacgataccgactttaggcaatgaagtgaggtgagtcacatcaaatacggattgagtggtatgtttcttcagtgtcacctggttatagaaaacctgcccgttcagcacataacccagtgcgccggagttgggggcctggaaagtctgtacgtcgacggtattcattttcacggtactttccgctccgaggatcaggccgttcatggcaaccagtacacctttatctttagattccttggcggcggcagtgactacggcattgtaaagattcaacgggccgtcggcacttagcgcggtagacggacgcatggcacctaccagcacgacaggtttgtcactcttgacagtcaggttcaggaagtaagcagtttcttccatggtgtccgttccgtgagtgataacgattccgtcgatatccggacgtttcagcaactcgttgattttcttggcaagtgtcagccagacttcgtcgttcatgtcctgcgaaccgattctcacaatttgctcgcctgtcacgttggcgatatcctttatttcgggcactgcatcaagcaatgcgccgatagcaacctgtcctgctgtgtagctggttccggtggcggagcttcctgtacccgcaatagttcctccggtggcaaggatatgaatattcggttttgcggcaaaagccattgcaacggtacatagtagtgcgactactaccagaccaaatctcttgaattgtttcataactgaatgatgtttaggttaataatatatagttagaatatttgtataaagagcaatcccaaagcaatcgccacgaccgtagacaccagtccgggcatcatgaacgaatgattcaacacatatttaccgatttttgttgtccccgtccggtcgaaatttatggcggccactacggtagggtagttcggaataaagaaatatccgtttactgccgggaacagggcaatcagcatataaggcgaaatgcccaacgcaatcccaagcggcaccaatgcccgcacggtggctgcctggctatatagcaggatggacatcacgaacagggcgataccgaacaaccacggcatctgacgaacaattccctcaatagagaaagtaagctgtgccatattcccctgaagaaaagtatctcccatccaggcgataccgaagatggcgatgacagcttgcatcccggccgggaatacagaaccctgcgttgccttgataccgtccgtccgggtcactatcaggataatggcggcagccgataacatgacaatttcgatgatagaggacattcccaatgtaattatctctccatcgataaggaagctgggacgcatcccttcgaaagaaccgaaaaggacgatgaaggcagtcgccaatataaaaatgataacggaaagcatggcggaacgtttgttctttacgtcttgaatctccaccttcttgctattgaagagaccttctttcaggcgtttctgatattcggggtcttccaccagttctttgccgactttcatggagaataatgcgcctaccaacacgcctactattgtagcgggaattgtgattttaaggatgtcgaacagagtgatgtcaaaaccggccaatagtccgagtaacgcaacggtagcggcggaaataggacttgccgtaatagcctgctgggaagcgatcaccgcaatgccgagcggacgttccggacgaatcttggtttcggtggcgacttctgcaatgaccggcagtacggaataggccacgtgccccgttcctgcaacgaacgtgaaaaggtaagtcaccaacgggctcaacagtgtgacgtgtgacgggtttttacggagcaaatgttctgccagtttcaccatataatccagtcctccggcggcttgcatacaggaagctgccgagataacggcggcaatcatcaacatgacgtcgataggaggggcggtgggctgtaagccaaaaacgaacgtgagtatcgccaatccgacgcctcccataacaccgagcccgatacctcccaggcgtgcgccaataataatggctgtcagaacaaatgctaattgtaatatcataggttgttgttttaagttcgaaacaaagataagtgatttctctctttgtattttctttttcttgtattaacaacaaaaaagttattgaatagtttttgcatatttattaaaacaataacctttctcgttggttatataagtactaaccaaaatgttattgttataaaacaaccgatatggaacagaatttatcaaaaaaaactcgtacagaaagcgacttgataggtagtcgtgaagtgccggaaagtgcactgtacggagtgcagacactccgtggtattgaaaactttcgcatcagtaagttccacttgaatgaatatcctctgtttattcaggcattggctattacaaaaatgggagctgccgttgccaatcgcgaactggacttgttgacggaagaacaggcggacgctatcttgaaggcctgtaaagaaatactggaagggaaacatcacgaccagttcccggtagacatgattcagggaggcgcgggtactactacgaatatgaacgccaacgaagtgattgccaaccgtgcgttggaattaatgggacatcagcgaggggagtatcaatactgttcgcccaacgatcatgtgaaccgttcgcagtctaccaatgacgcttatcctaccgccattcacatcggactgtactacacccacctcaaactggtaaaacattttgaggtactgattgaatctttccgcaagaaagcaacagaatttgcccatgtcatcaaaatggggcgtacccaactggaagacgccgtaccgatgacactcggacagactttcaacggctttgcaagcattctccggcatgaagtgaagaacctcgattttgccgcacaggattttctgacagtcaatatgggtgctacggctattggaaccggaatcaccgccgaaccggaatatgccgaaaagtgtatcgccgctttgcgtaagataacgggactggatataaaactggcggatgatctggtgggggccacctcggatacttcctgcatggtaggctattcggctgcgatgaggcgtgtggctgtcaagatgaataagatatgtaatgacttgcgtttgctggcttccggcccgcgttgcggattgggagaaatcaatctgcccgccatgcagcccggctcttccattatgccgggaaaggtgaatcctgtcattcccgaagtgatgaatcaggtagcctacaaagtgataggaaacgacctttgtgtggcaatgagcggtgaagccgcccaaatggaactgaacgcaatggagcccgtaatggcgcagtgctgtttcgagtctgccgatttattgatgaacgggttcgatactttgcgtactttatgtatcgacggtatcacggcgaatgaggataaatgccgcagagatgtgcacaacagtatcggagtagtgaccgcactgaatccggtaatcggctataagcattctacaaaaatagccaaagaagcgttggaaacaggaaagggagtttatgaacttgtccttgaacatgacatcctttccaaagaagacctggacactatcctcgaaccggaaaatatgataaaaccggtgaaactggatattcatccgaaccattgattgatgtgatagtaagtggaatttgattcaataggtaagtcgccgggcagatgtcatatctgtaccggcgactttcattatttcttactttttcccctctcgggaataattgctaacttatccggcaaaatggttattgcttatccctccggaagtaacgacctttgcattatcatttaaagatgaacctggcaaggtctaatcagaaccaattaaaagtatatagatatgaatgcatttgatgttattattatcggtttcggtaagggcggaaagacccttgcggcagagtttgcaaagcgtgggcagaaggttgccattattgaacgttcggacaagatgtacgggggaacgtgtattaatatagggtgtattcccacaaagacattggtgcatcaggcaaaaatggcttcggctctgaaggacgccacatttgaagaaagaagtgagttctaccggaatgctgtctctgtgaaggagtccgtgacaagtgcattgcgaaacaagaattaccataatctggcggataaccccaatgtgaccgtctatacgggcataggttcttttgtttccgccgatgtggttgctgtccgcacggctacggaagaaatacggttgacatcaaagcagatcattatcaatacgggagcggaaacggtgattcctcctattgagggagttgcgggtaatccgtttgtctataccagcacctcgattatggaactggccgaccttccccgtcgtctggtcattatcggcggcggttatatcggtttggagtttgcgtctatgtatgcttcgttcggttcgcaggtgacggtgctcgaaagttatccggaactgatagtccgtgaggaccgcgatattgctgcaagcgtaaaagagacattggagaagaaaggtattgttttccggatgaacgccaaggtgcagtcggtgaatcgtgttgaagataaagcaatcgtcactttcgccgattcgcagactaacgaggtgtttgtgcttgaagccgacgcggtgttgctggccaccggacggcggcctaacacgaaagacttgaatctggaagtggccggagtagaggtggatgtgcgtggagctatcattgtcgatgaatacctgaaaacgactaatccgaatatacgcgccgtaggcgatgtgaaaggcggattgcaatttacttatatctcattggatgattaccggattgtccgtgaagacttattcggcgataaagaacggcggacgggcgaccgtaatccggtcagttactctgtctttatcgacccgccattgtcccgtatcggtctgaatgaggaggaagcccgccggcagaatcgggatattattgtgaagaagttacccgttatggcaataccgagagccaagacattgggagaaacggacggcctgttgaaagctatcattgataagaatacgggaaaaatattaggctgtgtattgtttgcccccgattccggcgaggtaatcaacacggttgctgtcgccatgaagacagggcaggattatacttttctgcgtgatttcatatttactcaccccagtatgagtgaagcattaaatgatttgttctcataatagcaaaaggctatctaaaagtcggtagtaactccattctcctccttcgggaaggaggagtccccgtagggggaggtggtaggtgaatgcgtaagtcagttattatcagcattgtgtatccacctaccaccccggctttcagccacccctccttcccgaaggaagggaatggagatactaccgacttgctaaattaccaccaaatttgcagaagtacgcctctccttccttattagccaatatataatctaaccacttgtttcctgcggcgcaactttagtttcaaaggctggaaactctagttccaaaggcaggaaaccttagtttcaaaggtgagaaactttagtttctaacgcttaaatctaagtgattgattttatctttttgaaaatcaaaaagtaaggactaaaatcaaagataataggtaatacattagtaacaaaagtcttgctgcacattgcgtttctctgcataatctcaaatatctctatcacaaagatactgcatattttcgaatgcaacaaatcaatcgtttttttattgaggaccagcattatttactggtcctcttttattgaaaatctgaaggtatatcgataccttttttaatccaatagcaatacccaatcctgccacaccctattcggacaaacgccccattccagaagctcatagaaccatccgattgtaagttttgtccgttttttcatacattaaaattcattatataacttccatatattaatccaaagattctgcttcctcttcttctgctgcattttcagaggttgatgattgcataaagttgaggaaaacttgtaggaatgctgtttctttgtagaagtaatcgggattgtcttcgagcttgtcctgcatgaaatcgaagccgaagtttgcgtacttctccattttgtcaatgagcaagtcaaccactttgcggggcgtaatatcgcctttgtcaagggcaatccagtctatttcagtacgagccacaagagccatgaacatgtattcgcgaatctgaccatactgcttgcgaccgccacgagcctctgccgttccccaattctcaatcgcccagccaaagtctttccgcttggctttatctgccacaaggtctttagtctgaccatgatacagaccaatgaagaacgccagaatatacaattcatatcctgcgccgaacagttttgcacgggtttcttgatagcttgtcgaacccttaccgtagtcgcagaacgccttcagcaaggtgtcttcgtatttcgtttcccactcagggctacgcttcgcccaaaggttgaatatctttgttgctgccattattttattggagttatgatggttcgtattgttgaaaggtcagtctcgttatagcccgtctgtttctcaatgcgatatacagaacaggtcaaagcttctatttgcgcttcgttcagagtcttcttgcccgtcagtttgtccacttcaagcaagtctttcgtcacgataatgcactgtttctggattttgtcgatgatgttgtagaagacgttctctttgaagttctcaaatgatgaagttggcgcatcgaatatgagcggataatcctcttcgcgcttcagcgtagtgagatcggagatagcaaagagtagtgacatatacatggttgtctcctgcgcaccgcccggatttttgattggcgtgccgttagaactaaatagctttatctctgccgaatcgctcgctgtctgtacaatgcggattaggccacggaagtcattcttgttcagtttctcgaaataattgttggtgcgctcctcaaggcttgcgaggaagcggcgcaggttttcgctctttgcattaacgaaagcccgcatcactttgtcgagcaacgtatgcacacggttatacactttcgccatgccggttgtcggattcagttgctcaaactcttccttcaccttgtcgtattccatctggaccttggccaaccgctcgcggtaatcgctaatgcggtcttttgctcggtctcgctgctcatagaaacccttgatgtcgcggaaattcttatcaagcatcgcttccgtaagtccgtcggcttggatgagcaaacgggatttctcgtcttccagttctagcaactcagcctctttctctgcaatgtctcgtttgattcttgccacaagttccagtttatccacaacctcgcgatatttcttagaaatatctctcgccgtcatgcctccaaaactgatagaaagcgaatgaagctcctcgatatattgagtaccaaaaagcggagtgtctggtaattcttcttgcttggccgcaagttcctgcgacttatgttccaagtattccctcagcttgttctccatgaaacgatactccggcgtgcccttctttgctggtcggccgcataccttgcatacttcttcgtcaagcatctcttgcatcgtttccccatcaggcagataccaaggcaaacgtgtgaagtcgctttgcagacttgatgtcagttcatcaacgacttccttcttagcctttgccgccgctttttcctgtatgtcaaggtcgctgagacgtcgcttctctttgctcaacgccgatacctttttctgaaattcctcaaacacattctggtatggcatcaatgtccagaactcatcgagtaggttcgtattgtagcgcaccatcgtcatggagcggagcttagccagcttctcgcgttgcgtgtctatgcgcttcttgatgtcctgaaaactttcgctggtaacctggtgcttctccaaatcttcaagtttcacagaataggtgctcaccacatcttcctgtttcctgatgtcgcgttttatctcgtctatctgttgtccaagatgctctttcttacattggagttccgaaaccttctgcgaaatcttcttatccgactggcactcctttgcgtatgctcgatcggattttgcttcaagttcagtagcaacagcgacataatcttcaaacttgcggatgtcggagaatttatctacaagcgttcttaacgcctctttctcattaaaaacattcaattggctctcacctttgaacaggcaatacttacgaatgaacgcatcaaagcacacgtcaattagcgagctgccctttcgttgcatacgctcggcgccattagtctcgtaacctttgaaagcaaaattcgtcacttgacatactccgtttctcttttcgaaggtcagactcttcgacacctctttttctccattatgctcaaaaaacattgaaacagacatggtgtcggcttcatcttcgtccaattccgacttgcgcatttctgatatgagcgaagggtctttcgtctcatgagctgtgtcaagcaaccactccaacgcctcaaagaatgtggtcttaccatcaccattgccaccaataatcagagtcagtccctttgaaaactcaaaggtattctccttgtagtaactgcggaaattatttattgttacgctcttgattatcatatattattctttagataggttgttaccatattatatatttcccgtgggctgctctcctcatttacctcgttgataatccttgccacagtattcaccacaaggttatcagacacaagagcctcgtccaagctttgatagtcagcgggattgtactcgccaaactctatcagtttctcgtcggtcaaaacagcctgcaagattctgttgctgttattgttgtaatgtgccatcgttaaaacaatgataagttatagtaattcattatatcctccaattcgttgatagtgtcgtcgctgttttccgaaagcaacgagaaattcctgactcgacgtaattccgttgccattagactacgttccatagcatatgagccttcaccgatattaacttctggtgccaccaccaaatcatgtatcacagccatgtgcttgtcgggatgttttcgcaaaattcttcctcgacgctgtataaactgtcggggattacctgtgcttgcgcagaaaatggcaagttcactccgcggaacatcaacgccttcatccaaacatttcatcgaggtcagaacctctatattaccgtcggcaaatcccttcagcaattcttcacgttctttaatgccagatgtaaacttacgtactgtgactttgctgtcaatgccactcactacagcggtatattcattgatgagcttttcggaatagtcatcgtcttgtaactggtctgtatcatcgtaaacgtctgcatctgccgtatctggtttcaatccctccgggacatagaccagcgtatatttcaagttacctttttcttggaaacgctgttcaagtatattccggaacacctccaatttgttctctgccttatgaataatccgcttgcgtttcagtagcagtgcggtcagaatctcattgctatccgcaaaatggttgttgttgaagaatttagccaattgtaccgatattctcatgtattcttccatttccgacatcgtcagacgcacgacatgcggataataataatatcggcacaaaacacccttgtctatggcctcctgcatcgaatactcgtaagtaaagccattttctgcgccaaagaaatgataaagcgtctggttcgcttcttcttcaaactggcgttcgggagtagccgacaaacctatgcgccgcaaataagggatgccatccaagatgttcaacatccggcgtgagcccatattgtgggcttcgtcggcaatcagcagcaactttgtcttcgggaacacagacaacgacttgaagaccttgtctttgataaacgaggcgtatgtggaaatgattatgtatgatagattgttgtcactccctttcaatcgttcgcttaatgtaatcgtttctatctgctccgcccatttggagttcttggaacaaacccgtatgacgttcctgaaattgaatttcttgcactcctcttcccattggccaacaagcgtaatcgtaggcacaaggattatagctttgtaatagccgcaccgcttatatatttcaagtaaacagttgagcgacgtgatggttttgcctgtacctgttgccattgcaaacagccccttttgcttgtttgctttccagttctcaaacgcaaggtgctggtattcgcgaggtccttgcgagtagggaaaccgaggtgcagcttcctttcccctttgtatctcattttgatggattcgctcgataatgcttttcaccttattcttggctcgaccgaggaacgcggtcacagttttaggcaagtcattctccaatcggtcattgatgagttgtgcttcgtctgccagcagttcttgtatatctttgtttttgtaggtgtcagtaatatgtgtgcggatatggtctgtatcaagataagtcacgctctcgtcgttaccaaagaaagtgcgttcgaaatcgtccacaacatctttaatgcgacacacatcgctttgcccgtcccaatcgcagaaagcagtgatgctctcgatgttggcaataagtgccgtcttcgagaagttgcatgagccatcgaatgccacacggtttagtccatcgaagaacacgccgcacttggaatgggctatgccctctccagcttttggtacaaccacttttatctcaatgcggttatgacgaatcagccaagcaaggcattcgaagaaatgctggttgcgcttagacaacgtgtcgctcataccacccaaatcttgcaggttgaagtaatccacatcgtcgcacgagtctgctacaattatcgcacgcttatcctcggtagataaaatatcgttgataatcatgcgcatctttcctccattataaagaaacgcagcgaaaccgtctgccagtacattgatggccgatgaggaaaagaagcccagcttcagatcaaattgcgtggaattacacaaagcttcggagaagaagcccaaaggctcccattctgtccgcgacttgaatcgtcggctatttggccatatcacatcagatttcagcataggacataccttattatatattatataaagcagttggcgcaattgatttcatcatcaaacaagtccaccagaagcttacttttgctctttgccttcgcttcttcttgtttttttatctggtcaagcttgatttgccgcacacgctccggacgtatcagttcgctcaaaggctcgccttgaatccacgtatatccgtctttttcgtactccattgcctttttgaaaaggtcgggatgctgctcgtagagccaaatccattctatcttctgctggaagaagcagaaataacatccagagcggctacggcaatactgtcctttctttccatccacctcaaagtcgataaggttgtaatatgctggtatgcctacgccgctatcttcaaggatgcgaaagatttcttctctcaccaaaacctcgtcattgtcaatcaatgggaaatagtccaactttcccacagggtaatctgtgtattgcttcagaaaactgaatacggcgtgattaaaggtgattacatcagcatcaagtagcatattcaatttctttgagtagtagaagtgcttggtaagctttgaagtgagagccgcttcaactgtttgataggtctcatcgtctgcaacgttgcgatagcattctgcaaaattctcaatgttcttatcatgcagcacctcgtgaataacatccatactccagatattcttgcggaacgggaatatggcttgtatatttggctttgtcgatacatagccttcacggtcttcatctccgcggatacccacgtatgaaacagttggggtgtcgccaacaaatttctcaaactcagccagtttcattttctgcgtacaccatcttgcttgtaccgatggcagatagccaccgcttaccttcagaaagtggtcaaaaggagtaggttcaggacttccttctgccgcaattaaggtcgttatgtgtcctaagtaagagcgcaaccggtcaatgaactgaatggtttcatccaactcacatttggtgtcgctgctataatactcaatatgaagattggggtatttatcttttaggtagatggcaagagcagcactgtcttttccaccagatatacctaacacgtgtcttacttcactcatttcaatttctttttaaggattgctatcagtgcagcaacgtcaagcgagttgtcaccactcaaaatagactccagtttgttttcaaggctgttgacctcttgacgcatcgcttcggaaagaatgacttgcgtagttacagccttactcttattctgtgtgatatgcagtcttatgacatcctcacttgcagtcttgtgcatctccacatagtcatccagttgaaacagcatatctttcaatgtagccagcaggaacgatttatctgtgtcgcgaatttctgtcaaaggcttgttgagggcgacgtatgacaccgcttcaatccatgtggtcttgtcatcatagttgccaacaagccgggcttgaaaattacgcatatttacaggcatcaattccgtcttaaccgacttatatcgttctgctatcagatgatgatagtcagagaaaccgacttcttcaagtcgcagtattttaagcaaatattgctcgatattgccaaccaattcagagtagcagttgcggagttcgcggatagcctcttgtataacagcaacaaagctctcaatggcttctgggttttggctaagtgtaatttctttaaagcccaactcatccggcaacacctcaaagaatgttttctctgggtcggtcgcctttgctatgacatcgcggaacttacgagcattgggcgaaatatccttcgtacgtcgagcatagctattcaacttcttatagaaggtgaggaacggacgaatcgtttcgataaacgattgagtcgagagttctgagctgcccatattgatagcctctctatatttgtcgaaaaatgtacggcgaacaccgtcaacagcaaaggccttaatgagaaaaccattgggtgagcgcagtataaggtcaagcacctccttgttgatgtaaggtacataggttccatcgctgttatagagcgcgaaatcatctcgtttaataatcagatatgtgggaatccaacaatagagcaacccctgcttcagacgaaaaggcgcagcctctaacagagtgaagagttctcccaatttgtgcggtttgccgatagtggagcgcaggaagttctcacaagcgtcccaaagtggttggaatgaaggttcggtcggtgagcccagtccggcagtcgtatgaatacctgtattcttgagaagtgtgagatatagcgatttctcgggtggatacttatccctctcaaagccaaggtatggctcggaagagtggtcaagcaatgcctgcaaatacgactggcgggcaagtgacatattaccagtagggcggtgcttgttaatgagctcgaaacgatagattggagtggcataatagacagaatcacatatggtggagagttgctgtgcgagtatcttacgcgatgtgattgacgcaaggatttcgccgttaaaaatccacgtcacgttgtcagagaagaggctctccataatggttttgttcaacattgacttttcgtgaaccagcaggttagctatctcgcgattggctactttgtcgctttcgtcagccacgtaatagtcgcgcacccaatggagtttgtctatctcaaagagatggtcagcgatttcggttgtgttctcaaaaatgcaatagaggatggctttaccatttatgtccgtgcaagcagctttgacagcaacaaggtcttcctgacgggtcagtatcacattgataatcccgtcggtctcgccactgacgatgtattcaataggcgaagaggtgagacagtactggaagtatcgtggcgtgccagtgcgaaaatagtgcgcattggcaagtgctatcttgtcgtcgaagtattcacacaccttctctgctataacatcgggatgcttgcattcgcgagcagcctcataaaggcctgcttccaagtctacatcggttccctcaaaaaggatatatttggacttgtatttagcgaaacgcagtatctggttcttttcgaggaggtctatcaccgagcccacttgacaaacgtccatagcatagctagcatagactatcagaaattgcttgtcgatgctagcagcagacgaggcaaagatatttagaaggccgacggccttaacaatcttgatggcatcggttatggttgtggcatctgcattgagtccctctgttctttcgatggcaatcttgatagccgaccaattcgccgagtcttcgtggacctcttgcaaataagaataaaaattataaacaatataatcatgaacgtcggcaagactatacaaacgattgattgaagcttcaaaatcgttgacagtcccctcaccacgcgtctccaagaatgtgaacaaggtacgctcattctggccatatctctgattagcttgggtaaaaacgtaagccgagacaatatccattggatagagagcacgagcaacgttggcatcaagtgtgctggcggcaaacttagaagcgacagctaggttgtaaatcttgtctgtgttgagtgttggctttttatcagccgaagatatatgagtggcggtaaggttgagaagttgctctatcggttcggcaaagacgatatcctgaatgcgaccttttaccttcgtccattcctgtttctgctctgctttcaatcccttggcgtaggctccaaaaccttggtgcaacgttgtaaggaagagaatgttcttacttgtgtcatttacatactcgcagaacttctgtaagaagtacatttctttttcaggattgttcttggctgcatgttcaagtactttaccgaactcgtcaataacaataactaagaattgattcgccaactgaagtctgttatagtggttgtccagcacagagataacgttcttactttctgcattaagatgtgacgcaagtagattcgccaacgatgtgtagtcgccaacgatgtttataaacgagaattgctcaaaactattgaattgaccacattggctcagtaagacattttttccaacagtctttccacacagacagttttccaaggcgaggatgaagctggatttgccagtgccgtacgagccgatgaggcaaaacgaatgaatgccactggcaaagtgattgataattttgccgatggtctggcgagcattggcagtgacgatatagtggggtgtcttgccaaagtcacgctctatgttgattgaagtagtgaaactcatgttgcttgataatacttgttgagaacctgccacttgtctatccgctctttcatggtgaagagttgctcaccggcagtattgcagaaggttatatgggggtcgatagtgtgcagttggtcgaaaacgtcatatagttcattgacagacataccgaagatattggcaagtcgcagcaatacctcgaactctatcacttgctgtttgccctgcgtgatgtcgagtacggcaaagaggaaaacgagcggctccatcttggcgcgagcggaacagttgaaggtataatcctcgtgaccagctttgcctatcagtttgaggtcaattagcagtgcagagaagtcatcgcacgccttgatagagtcaggcgtaacataattctttagcatcgtgtcgatgtcacgccaaattgtcttctcgttgtaaggtgtgctgtcaaagcatttgtcggcaaacatccgtcttactgcatttgccaaatctgctttcgtgaactctttgcgtgttttgttgtactcggtgaaaacgatgttgtagagtgttgctactcgtgatgtcacgagcatatagtgtagcagccatagtgtggccgtgtcttcgatgtaagggtctgcgccgttgtcatcaagaagatatttacctatctcggtcggcacaccattgtcgttagtgatgccgaaagccctcaaccaatagcgtattgaggctaccatattcttgcccacaccaagttcaacaacagcgtagtcgtctgtgaacgacaatcccgctttagcgtagtcatatccttttttcaaccacaagcccttgcattgaaaggactcatgaccagagaatgcatacttcataattactcttttgatggggttagtaaacatctaacgtcaatattaagaactgctgcaatgtcatacaactgttgaacagaaggctgcgtgcgattggttgtccaacgagaaaccgtattctcactttttcccaactccgttgccagccatttgcaggttcttcgctgttccgccaagacgacctttatgcgattcatcaccatatttcggttattaatactcttataaatgttttatttcatcacaaaggtaggaattttatttgaaatacggctaaaatggttttatattgcttggttaaatattcattgcacggtttacatactaaaatgacgattttgcactaaaagcacttcccgttcgacgcaacgaattattttgatgtgtgcttaatttcagtaaacaagcaaacgggacatatacaacaaatcacagcagggtataatatacctatagtgaacatctataaatgtcttactctttaactgttgatgtaaactgtgaaatcacgattagtcaaagacaaatatcaaacaagaactctccatataaagctacgcacgctatctctctttgaacttctgcacatataatgcgactgtaaaataaatcattttatcagaagtccatctatcatcaagagatagccgataaattattgaatttgactatttgtaaaggcttgttttgagggtccgtcaacttttgttgatcagttttttaccattttttattgctatgtaaatgtttacaagaataaacatagcatacatgttgataagcaaaagtgcacttttttttatgaattgacaaaatattgccatgtttcggcaggatttaattaataaatataaaatccatttatcttttatggtacgctagtcatgtaataatttttgttgtattatgcagccttagtaaggcttttgtattactaaaaaagatatttcagagaatatttttctgcacaaggtcagttttatttgtcggagcttattttaaaagagtatttgttgatatatcaatcatcttcttcacctgatgtcgagatcttagtcgtattccattaaaaaacaggttgataaaagattttttaactttctgacagcaaatgtattacagataaaaaatagggctggcggtatccgtcagccctatttttacatttcctttttcccaaactttgcggcagaaagaaggataaatgacgaacgaaaaaggacaaaagatggaagcaggaaatgaagacatcgaaatgctgaaagcattaatccagaagagcttctccgagcagcgggagctcatcacccggctggaaacggcactggatgccatgaccagctttaatggcaaacagatgctggacagccgtgacatgcgcctgcagttgaaagtctgtgaccggaccctcatccgctggcgtaactcgggcaagctgccttatttcaagctgagcggcaagatatacttctgggcttccgatgtataccggttcctccgtgaggaatacagggacgaaagtccggacgtcagaaataacaaacccgtaaaaaaatcatagaagatggaaaatcaaagtaaagtcatcatgatcgagcgcaacaagtttgcgtctcttgtcaaggcgcatcgcaaatgcctgcagatgctgagtatcctggcctatgcctgcgcgacgaaggaagtgcagctgaccttcacattggaggaaatctgcgaactgctacaaatgagccgtgaggaagtggaaagacaaagacagaaaggctacatccgcttcgtccaccggaacggcatgacagtctatgaaaccaccgacatcctccggctcaagaacatgcttgagatggggggtatctaccggaagatagacgagaaagccttcattctggaagcggcggagaaagaaaaaaaagaaacggaaccttcaatcagacaataaatatgggacagctggtacacgcctcgcttttcagcgggttcggagcggcggatctcgccgccgaatgaatgggatggcgtaacgccttccattgtgagatagatgaattttgtaacaggattttaaattactggttcaaccatgcagaaagttatacagacattacaactacggattttcggcagtgaaggggacggatcaacgttctcacaggaggtttcccctgccagccgttttctgtcgccggccagcgcagaggtgcggaggacagccgttacctctggcctcacatgctccgtgccattcacgagatccggcccgattgggttgttggtgagaacgttggtggcatcctcacgatggtacagcccggtaaggagactcacgtgggatatcagccctctcttttcggaaaggctcagcctgtataccgcaagcgggaggagtacgtcgtggagaccatcgcgggagatcttgagcgtgaaggatataccgtccaaccgttacttattccggcttgtgccgtcggtgccccgcacagaagggaccgtgtatggtttgttgcccactccgatggcttcggacttcaagacacggggagcgggcagcgcgcagaaggggcttccggaagtcatccgtgaagggttgcttcccacccccacggcaatggagatacaccactggcagcgggtggagagatggaaacggcagggccgcgtgtcgatgtacgagtcggaggacggggagaagaaccccaacggcctggtcgatttcctggacttttacggcctgctcccgaccccgacggcaagggattggaagggtgccccgacgctggagaacttcgagaggaagggcaagaacccgcagcagggaagccttcccgatttctttgcccaaactgggagaagtttccaactcaatcccctgtttgtggccgagatgatggggttccccgtcagttggacggtattaccttttcttcctggcggcagcagtccgttaaaggatacggaaacgccatcgtcccccaggtaatccatgaaatattcaaagcgatagaatcaacctataaataacatgatatgcatacgttaattattgcggaacatccgcagttcggcaaggtccggaccatagagaatgaaagaaagatgtggttctgtgccgctgacgtggcacaggccctcggctacgttaattccaatgataccattacccgccattgtaagacgaagggtgtcgagctttacgatatccctacggcgggcggacggcagaaggtgaagttcatcgacgaggggaacctgtatcgtctgatagccggcagccgtctgccatcagccgagagattcgagagctggatttttgacgagctggtaccacgcacgctgaaagagggcggctatctgctggggaaaaagggggagacggacgcagaactgctttcacgcgccctgatgttggcggaaaacaaactgaaggagcgtgaccggcacatatccgaactgaaaagggaaaatgcccagaataccctgagattgggcttacaagcccccaagatacgttactttgatgaggtactgcgttcatccagtacctatacgcccacacagatcgccaaggaacttggcatgagcggcagggaactgaatctcaggctcaaggctctcggcatccagttccgccagtccggtacttggctgcttgccgcccgctatcagaatgaaggatatacacggacccatacgcacagatggcagaaccgcagcggggaaaccggcacggccatgcatacggtgtggaccgagaagggccgcctgttcatccactgcctcttcagccacctgcccgtcttctaaccatccgccactgacggcagccaaaagggctgtttcccgttatttgggagaacagcccttgatatatccgttccggcacccgcctgtcaagatatgcctgccggatgtcccgctttccacaggcaggtttccgtacccgctcccagttaggagccccaatattttacgctacgttttacgattctcattatccatgacttaacttaattttcattatacccaccaagaataagcaggactttacagtttaggtcctcttcggttttccctttcccgcagtgtccgaatgtcccgctgcgtctcctgctgccgtagcgtgtcggcgagtatccggatgaaatgcccgtaatcctccacgagctgctggacgcattcgagccgcagcgtgtgcgccatgttcgccatcggacttgtactacgggcggcgatgtcctgcctgagcaacgtgtccaggcagacattctgcctctttttcagatgctccaacactttttccggactgcccgattcccttgccttctttctcaagtccctgaaacatttgtacaggtaatactccttgtacgcctcttccgcgtgtgactcgaaaaaggcgaggtaatcctcaccggcttttgccgccttgttctggatcttttcgtccaggagttccattttctcattcagccggtccataaaccggtccatacctgggttcagcctttccataccttatcgttttaatccgttcgtcctatgttttacggggtgtctgttttcctcttttatgtcctgttccggcttcctgagggaaagtatgtgtgagaaacccaggcaatcctgaatcagcctttgcatgcactccaacgacagggtatgcgccatgttcgccatcgggctggtgctgttccttgcgggcggattggcaagcagcctttcctgctggtatcttacgatatccttgaagtacctttgcagttcctccacatcatccgtcccgttcaccttgttgcggaacacgccgtagtaatcacgcaggcggcctgccttgtacacctcgtccgcctgccattcaaagaaacgggaatagtcctttttcgcctcttccagccccttgcgtatccgttcttccgtgccggcaattttcctgtccagcgactgccggagctgttcaatattccaattgtcctgtctcatgctttacatttttaatccgttcgacttctttttcattgtttccggctctatttcggttttcacctcttgacggggaggcttcttcgagagaagctgtccgaacccgttataatcttgtatgagctgctgggtacattctgttctataggaatgcgccagattgaagatctcgtccgaataatgaatataaattgggccgttaaccagctccctgacacattttccgcgttccgtctgaagatactcatgaacctcttcaggccttttcgcctttttaaggacctggcggagctccttatacttctcgatcatgtaatacgccttgaacaggtccttgcccgcccatgcgaaataatagaggtagttggagtccatttgtttcttgtacatcctgatcctgtcgcttttgaggtttatctgcatctccagatacttcaatagttggtccatgccgtatttttcctgttccgtcatagcttccgtatttctttatctggcagtttccgtatttgccctgtcctcgatggagaacgggatgtccagtgtccgttccacgccgaagttgtccaccgccacgaagcggatcccgggattgtccccacccgtgttccggtaaaagagggtgaacacctggcggcggatgtccgtcgtgtccagccctgcgatgccggagagctccgtcagctcgcggttcaccagtctggtgccgtcggttccgaacacctcaccgtcaccctccagctgtatgtatccgatgcggtaacgggcctcccggtaatccccctcgcggttaagcgtcagacggatctccaccgtctcatccggctcaataccttcttgcaggtaccaggaagagagcgagaagtcgtatgcctgccgcacctccaaacggtcgtcgcagccggcaagggtgcacgccagcagggccagcgcgcatcccatgatgaatgttcctaatttcattgtttccagttcttaaaagattaatcgatgatatatttcagtccgacggccactaccgtatggaaatgtcctacggacgatccgaagaagacacactgccggacattgaaaagaaaagcccagcggtcggtcaggtacgcctccatctcgaatgccggggcgaagccgtagatgaaggcacccttgtgcagcagggtcgccccgtcataaaggagcctgccattccggtttaccctctcataaccggccagcgcggacagaccggcggacaggaacacgttcctgcccctgtccgagaggaacgggaagagacagcccgcctccgcggtgaactgctccttgggaacggccgtctccttataggcatagtgtttcttcacgtagtccgcaccgaccacccagcgcgagcggttgcggttgtaacggctcagggccagtccgatctggaaattccccctcaggtgccttacgttccttccgaagtcatccacgccgcccagcctcagttcaagccccgtctgcccgggcaggtagcgttgggcggaaaccttgcccgccaaagaggacaggaagacgcacatcattattataaacagatatttcctcatagaattactcctttatcagttcgtccaccagtctggcgtccaccaggtcactgttctcgatatggaaccgctggtggcgtccgccgcctttctcgtaaatctccacctcgatgagcttgtcatcggggatgaccaccttgtggaaagcatagacgatgcgtccttcccccttgccctctatgcgcctcagctcgttgagcgcgcgcaccggctcgatgtaggtctcctgctgtgccgttcgcttggccactttcttgtccaccaccttgaagcgcacgaagtcaatgtcgaagggcacatgcgaggagttggccaatgagatgtggaggaacagcaggtccttatgcacatagacgcccttgagcagggcctgcatcccgaactggcggcagccgatgtgcttcacgtccctgcggtccagacggtgtacggtgtacatcaggctggcgatgaccgaagggtcctcctcgccgagctcggtcacacggacggcgcttccctcagtggagggttctgtcggaaaccggctgtccatattgatgttcaacgcttccggctcctcttcgtaggagacgaggaacgaatagaacgagccgtcgcccgtgatgaccgagaagttcgtctcgccggggaaattccggacggccgcctttacgcgcaccacgttctccacaccgtccgccttgcccgcgatgatgtccgtgctgcccagatcgacatagcagacctccgaggggaaaaggatatgaaccgtcttgctgaagggcacgccgatcctgtagggcgtgatatgctggccggcggtcaggatcctgactccgccctccggcttgcgctcctgcgcccggcaggtcatccccgccagcgcagccatgattaaaagaatgaatgttctcatcttgaatgattgcttaaaaattacagttaaaccttgttattgcttttttgtgaccagtaacaccttgtacccggccttcagctttaccttgaccgccttgacccgctgcgagatgaaccgtgtcccgccctgcaggacaccccgcgtgaggtccatcgccatctgctgcccggcggaaccggcgaaggagatgctgccgcccatgccctggctcatatcccccaatacttccttggcggccgtccggctttccgatcccggcacgaagatgccccgctgcccgtcgatgtcatatgtggccagttccaccgggatgatatttccggcatattcgatgctgcttaccaggatgtccagacgttccccccggatgtcggccgtaccggtcaccaggctgttggccggtatggtgacacttccggcctgcaggggctcgagcaggcgcagcttcacccgtcctccctgctcgagggtctggttctcggagatgcaggccgggatggtgttcatccccatccggtagctgctgcccaccgccgtgttgaaaccgtagttcctctccacggccagtgaggcgacaaacgcggaatccgtcagcggctgctccagggcggaggtcgttccgctctccgcccggctgacagggacaggctccggcttttcttcctccttcgcctcgccgggcgagccttccgggttgggattcaggtacctggcggccatccggtaggactgttccatcatccgctcgcgggattccgcgcgccggttttccgcttccgcctcttccaaccggcggttcagctcgtctaccttctgttccaggccgccggccgtttcctgcggtgtctcatagaaggtctccagttgctcggtgatcctttcgtaggtgtccgccgactgccgtatgcttccggccgggccggatacgctgtccgtctgtcccttaccctccaataaccttccggcaaggtcggagagcgactgcatccgtctgtctttctcacgccggacctgctgtctttcataaacgtccgttttattcccttccagttggaccgctgccgggtccggcacgttcacgttgaatccggaaccgcccgccaccgtttccccgctgtcaccggaaggggcgaatattcagtagaggacagcaaggaataccagcacgaagaccggtatgacgatgtatttcctgcggcgcaggatttcctccccgctaagccgtttttccgttcttgtcccttcggaggggacggaaccggcttccgccggccgtgtgccttccggggtttccccagcgggcacgtgtccttcttccatgttacttttcctgttttccattctgctggggttgtttgatggtccggtaaatacttgttacttgtcctttcaggggatcgggcagcctgcgcagggtatccgtgaggctgccttccccgaagggaagctccatgcgctcccttgccggtgtcagccggccggcggcgcgcagcaggacgatacccgatgcgacgcaggtgaaggccagcatcgccacgaggatgccccgtctctgtttctcggaaaggccgtccagatatgccttcagcctttcccttgccgttgattttatatccattttccagatattattgaatgattgattactgcgggacaccgttacctttccacggtacgcaggtccctgttttccaatatctcaaaatgctccgcaaggaagccctgcgggttgttgtccgagcggaccgtgctctgcaggcggcagcgtgtcaccagggagcgttcggtgatgttgcttccccggatgatcatctgcctggcataggtggtgacgcggtagggatagctgtcgaaatcgcagctcatgctgtccaccaccaccgtctggttgacgttcccgctgatgagccggttatagaaacctttctcgttccagtcccggtaatacccgtacaggctcttgtcggccaggtacatcgcccggtttatgttcgactcgatggccgccttgtcgggggccagcgtgaagaacagctcgtgcaggcggcgcacatgctccctcgcttccaccgggcggttgcgcgtggcgtcctgcgagagggccatgataagcgacttcccctcgtccagcacgtagatcttctcccgctgctcctcggcgaaccggtaggacttccagacggagaaaacggtcaggagggtgcaggaggcgagaaagacgaggctgaacaggcggatctgcctgaacgaggactcgatgttttttaagctcttgaattccatgtcttgaaatgaatgaatgttattattcagtcgtttttactttttcagcagcactccggccacgttgcccgtggatgcccccgccacggccccgcccacgttggcggccttgctcgccgtgttgttcatgttccggttgtacgcacccataccgccggcctgtaccacccagttcgccacggtggggacacagaagtacccgaccagccctatgagcatgaacaccagatagatggccgtcgatccgtccggggagaagacgctcaggggatcctgtatcatttccatctcgctttgcagcaccagcgtctgtatcctggcgagcatcacccccagcaggtcggagatgggcagccagaggtatacgctgatataccgtgccagccactgcacgagcgtgccctggaaaccgtcgaagaccgagatagcgaaggctataggccccagcacggagaggacgatgagaaagaaggtgcggatcgtgtccaccaccagcgaggcggcgcggaaaaggaactccatcaccttgcgcatgatggtctgcacgatgctttgcagggagaaggagtaacaggtatgggacatccgctgcatcaccgcgtagtcctccccgttccagcccatgtcggcgatctccttctccagctcctcgtccgtggggttgaactccccggtcacggccactttcaggggcatctcggagagcagcctgtccttttcctcctggaacttcctcacgtcgaaggtctggtcgtgaagcatggcacccgttccctgcacgacggggctcaggataccgttcaggcttcccagcacgatcacgtcgaagaacaggatgcagatgcccaggcagaaggggcgcagcatgccgaacacgtccaccggttcggcacgcgagagggactgccacacgcggtaggctatgtagaagagcgcgcccagggcggcgatggccgtggccagcgtcatcatcggctggcagagttcggtcatctcgtcatacagccggcgcaggataccgtgcaggctgtcgaaagatagggatagcaataccatatagtctgtatctttttaaaggtttaccaatagcgttcgtcctccccgtaaagcttcaggacctgttcggtctcgcccttctccctggcccgcaggtaggagacgcgcaggttcttgcgggtgtagtagttcaccagcgtcctgtaatgcctcatctcgcggtacaccctttctatgaggtccagccgttccttgtcggtcatggacatgccggtggggttgatgatgtccttcagcccggctacggacgcgctgcttttcttcatgatgttgttgtagccgaaggcgatggcctccagctcccgctgcgtgtagttctcgtcggtgagcatcttcccatagttcgtcacatagctctccgagatttccgagagcatcagcacggactccttgacctttaggctcccgctcaccagcgagttcacgctcttgagcatgtcgtagtatttccggctttgctcatagatcttcgaggcctccttgaaggtggacatggcgttctgtgccgtctcggaggtctccaccatctcgttgacgctgttcacgataccctgcgccaggttgcccgggtcggtcaccacccattgcgcgtgcatggccggtacggtaagtaaaaaggcgcacaatgcgctgaaaatttttcgtctcattgaatcgttcttttaaatgttttacaaagattatttcctgccgctgttcttttcggcggccagtacccgtatggcctgttccatgctgccggtctttgccgccatccgttccacttccagcttctcgctctcctccgtcgtgtaggtaaggtactcggccgtggaggtctccgtggcatagacggccgactgcacgcctcccagtcctattcatacctccttgtaccggcgtgaggggtcgttggcgcggttgatggagagaatctgcgagcattccttgtcggtcagccccaaaagggtctgtatccgttcgaacttgttaaggtacttcctctggtccagcaggatcttgcagtccgagttgttgatgatggcctccttcacgatcggggacgagatgatgtcgtccacctcctgcgtcaccaccaccgcctccccgaaatactttctgacagtcttgaaaaggtacaaaacataggtggccatattgggggacattagtgatttccaggcctcttccagcaggatgaccttgcggataccttttaagcggcgcatcttggaaatgaacgtctccatgatgatgagcgtcaccaccggaagcagcaccttgttcgatgatatgttgtccagctcgaatacgatgaaccgtttgtgggtcaggtcgatctccttgtccgagttcaggaggaagtcatagtcccctcccttgtaaaacggctccagcacgtttaggaacccgtcgatgtcaaagtccttctcgcgcaccctctttttctccatcatccggcggtagtcgtcgcggacgaactcgtagaacccgttgaagtccggccggagctccgggttttccgtaatcctgcggatataggcgttcaccgcgccggaaagggcgacctcctcggagcgtttcggcagctcgtcctcccgcttccagagcgtcaggatcagtgtcttgatgctctccctcttttccacgtcgaactgccggtcctcgctgtagaagggattgaaggtgatcgggcggtcttcctcatacgttatgtagatcccgtcctccccgcgggtacgctcatggatgagccggcacagccccttgtagctgtttcccgtgtccaccagcaggatgtgcgcgccctgctcgtaatagttgcgcacgagatggttggtgaagaaggacttgccgctgcccgaaggccccaggatgaatttgttgcggttggtcgtgatgccccgcctcatcggctcgtccgagatgtccaggtgcagcggcctgccgctcagccggtccgccatcttgatgccgaatggcgagggagaggacgcatagttcgtctccccgatgaagaggcatgccgcctgctcgatgaacgtatggaaagactcctccgccggaaaatccccctcgccgccgggaatggcagcccagtagagggtcggcgcgtccacggtattgtaccggggcttgcagcccatctgtgccagtgccgaaccggtgtcgttcttgacattccttagtctttcccggctgtccgcccaggacatgacgttgcagtggcagcgtacggggatcaggccgaaggaatgcgcctcgttcaggtattcctcgatccactggcggttgatctggttggcgcggctgtagcgtgagagggactgcatgttccgggccgtcttctcaagacgctgaagggtgtcggccggatcgtccatgaacacgtactggttatagatatggttatgggaaagcatcagccccacgggggcggcaaaggagaggcggcagtcgctgcggtcggtggaatacttctcgaaccgcccgtccgtccgcaccgctgcgggcaggtcgtccgcgtcggaaagcgtatgcaccgagaggatctcgtccccgatacgcatctccgcgggggaaaggctgatgtctttcagtgtggtggtgttctcctgcgagagggagaaatacttctcgatgatgccggccttctttccggtaccgacaatctcgtccgtcgtgaggcgttcaagccccaccagccctgaatcgcccatgatgcgttcgaactggtccacgctctccatgaaccggaccaccgcctccctgtccctggcctcccggggaatgatggccccccggcaaaggatggagaagttgctctgctgcaggcttctttcgcgggtagtccgggtaatgaacaggtaggcgtaatggttcaggaagggacgctcgttgaaatgcagctcgaagctgcggtccaggaatcccatgtcgtcccggccagttacggccctgtatttttcctccaggaaccagtcctgtcggtggacgaccgtgtaacagggcagcacctttatggctttcacccacgtcccgtgcatggcggcgtactccgccgaggtgagggtgaacagctccggcaggcgtaccttgaagccgacggtcacgtccgcatccttggagaggatgcatcccctttcgaccgagaggaccgggaacttactttccagtgttgccgctttcaggatgtttctcatgactgcttcgtttaaagagtgaaatgatacgtttacgattgataatatggaaggggcggcactttgccgcggccagtttcatcagtccgtggggaccgtacttcctgcccaggcggaagaccgtgaggaccagggtcgaggccgagactgtcccgaaaaggatgcagaaccaccggttcaccccggccatgtacaggatgacgaacacgaggaagacggagagcaggcccccggcaaggacatagagatactgcgcctgcagcccgctgaattccacgccccggtcggcccctttgttcactttatgttccatgaccgccggattacaggaagaacgccctcaggacggtggcggccacgatcaggaacacgcaggctccgaaccagctgccggcaactttacccgtatcgggatcgcctgacgagtcgagtaggtcagctcccttgcgggagctttcccctctaagaaccgtacgtgcgagtttccccgcatacggctcaagcaacatgaccgttatcggttttgatgccgataaagccatctcatttacaactttcatgctcataaatctactttttaattatacgtttgcaactggtatgtacaagtgtcctcacttttcgtccatcgacaatttgctcggtgatgctccaaggtcgttcacggtctatacgttctccacaaatcgggcatactttattctgtcgtttccaaatgtttattagtgattgcctgcctttcagcgtttgcttcatatggtaggtctcacgccattcgtaataagacttgtccgctgggtcataaggatttgcatagtgccgaaccttgacgaacttttcatggtggattgcagaaaggtatgttaattccagataatcaattttatccttcttttccatatcggttgtgaatctccatgagcgtccgttgatggtcggaaaatacttattccttacccaacctttaccctttcgtgcatgcctgcgtcgtgcccattgccatgtctttttgaagatttcccagtccatacgttggaatatttctccggaagctccgtacttataataattgccccatccttttatgattggattcaacatcataatgagcgacttctgttttacacacttattggattcaattacttttcggattttatcgcaaaatctcttttgcgcatcttttgacggtcttgttaacaacgtattattacggaactttcggatattgaagccgaggaagtcaaaaccttcacctatgtgtgtaatttttgtcttttcttccgacagcgtcagaccacgttctgcaagaaatttgcgtacaagcggaagaatgacctcttcaattgtctctctgtcctttgccgttataatgaagtcgtccgcatatcgcacaaggtgtattttcgagtatatcgttttatagttttccttgtgtttctttatgcactgctccactaaagtttgtaatccgtcaagtgccatgttcgcaagtgtgggagaaattatgccgccttgtggagttccctcctctgtggggaaaagttcatcgttgaatacgtagccgcatttgagccatttccgaagcatctccttatccataggaatattgttgatgagccagtcgtggctgatgtggtcaaagcatcctttaatgtctccttcaagaacccattcgggagctaccgagcgagaaaggacaatgtgacattgctcaatggcatcatgggtacaccgatgtttacggaaaccgtaagaatgactgtcgccagtagtttccgctatcgggtcaagtgccatcagataaagagcctgcatagcacggtctttcatcgtaggtatgcccaagggacgtaattttccgttcttcttttcgatatttactcgccttagcggttgtggacagtagccacgtcttttaagactgagtatggctttggctttcgccagcggtgatgaccatatttccttgtcaacaccagaagtagatttacctttgttagtcgtaacccgttttactgccaatgctttggcataaaacgagtgggtcagcatccattgcaaggctttcaccttattatatctgccttccctctgagcctttacaatacgtgcttgcagcttttggacgaaacattcgcacttgttccagtcaatttctgaccagagttcgtgaatgtctatgtcttcgggcgcacacgccaatttctttgcgttcatttgctttcctttctttaaaagttctgtaaactatcttgtaaagagttaccataagcggaagtctgctcgttttcacgccgagtaatattactggtgtcaatccatgacattggttcaactcgtatcctttccattacaaaaaggctttcgctttttccgctatcctatacccgcatcccatgtaggcttaccttacggcttgcttacccattcaaaaatgggagaaatacgggcttaccgtgttttacatcagtgacaaataagcgggttaggtcctgtctattccaccggcagtgctaatatccgtgtatccccaaaattcaagaggacaaccgactgccaaccttttggtctcaagcctttcaacatctttggcttgttgtactttacgatgtttatcggacagttcattttcgttgaccataccgctaagccaagctcctcgtgctgaatgatgttatcagccgttgacatcccctcacggttcagtctcctcctttcggaaaggctaccttgtcgggacagcttcatacaaaagaattactcctgatgcatgtgtccgtaggctactccagacggaactggaggtgtaatctaaatgttacacaatcactgatgcaacttcacgtcgcacgaactttgaatacacttttatggctccgataagcccgcagagcgcaccggccgcatagatcagcttggtggcgggatcaaagtacgaggtcaccatctgcgtggcctgtaccagcccggcggacccgtcaccgacggcgaacgcgggggctgttcatgtggccagtcatgccagcaggaagaccgtttttgccggtatgcgcccgataagggatacaaatacgtccgtcactttgcccataggggagaatcttaaaaatgaatgggatcttgaatgtatcattgtttttatacctgtatgattaaaatgttagactttcttttttaacaggccgcaggccggatgcccgcggcttgtccttgcaactacatgtttactgccggcatcagccggaatcataataacctcgcatagttacctccttccttaattgttcgtcactcgtgttattctctcttcagaatgggatgtccgccggatcatcccgagtcataatatccgtttgtcattgtactttttctttggatggttgtatatacgaaccagtcccggtcctttttccctttccgctaccggaggaaatcatcctgagtcgaaatatccgtttgtcatacttctttttttacctgtttaacgtaatgtcagttttcttcggggacgggattccgggatcatcccgaatcgtaatatccggtcatcgttacctccttcttttaaatccgactttgccgcccggcggcttttgttttcttgggaaaatgtccgcgaagcggatcagcttgaatcatgatacttctccatatacattataatattattggttatcggggtatgaaatccatgatatcgaaatctctgattatgctttccctgtcctttcccgccagcaggggcggctccctgtcactgtccacgtacagttccatgtaccgtttcaatgtctcgtcgctgcccaggatgccggcctgcaggatgcgttccatgtcggtcccttccagccgttccagtgtctggcgggcatgggaccgttccggttccgaaaggcggtccgtggccatgaacctggagagcaggtccatgtcgtcaaaggtcacgcctctggcgcggtgcggatcgggacgttccacataaccggtgatctcgtagcgttctggcacctcaccgtcctccggtcttccgaaaggggcggggaattcgggcacgggtgcctttctccctttcatggccgtatccgtccgcttttcgctcatcgcgtattcctcgtccataggcggggattgccataaccggtaccggcttctaccgatgacagcttcctcggacgtttcctcccgtggtttcgccggttcttccttcaccggaagaccggaggcaggacgctgtccgcccctccatttaaggacgctgcccgtgtggacgtacttctctacgctcaggtaagaggcgtacaggaacagaaggatgaatgcgtactccataccggtctacataaggtttgtcatgggggattccccttgtttttccgcaagaccgatgataccgcatatctcatccaccagctccatgagtcccgaaccttttacctgccggttgtcgggtaacaacaaggtggaacggaaaatgccgcctcgcatgctgcttgcttcccgattgtaacgtttggtctccgggacgcaggttgtcatcaggtgcagttttgagtcacatatggttttgttccacgcctcgaaggtccctttgtcctcccgcttgtcgatcatgttccagaaaagatggattcctttcaggggatagtcctcatgggaaaccagttcctcccggattacagaggcaaactgcagtgtgctctgcatcacggcatcgtccgcttttagcggaatgaaaatgtggtgcatcaaggccagggtacggatcatccccatgtagcggaatgcgcggggcagatcgaacagcacgatatcgaactctgtctcctgttctctcatataacggtaaaagttctccaccgcgttctccggctcgcttttgatgatcggataggccttttgcggtttttgcttgtactgacggtaaagggccattttcagggaatcgttttccttgacgcattccaggtcacggtcccgcatcagaccgatactgtgctggggcgggtcacaatccaccacggcaacgttgtatccccgctggtaacgcaggataccggccgtgagcacggtgaaggcagtcttgccgactcctcccttctggctggcaaatgcgataaacaaaggttcttttttcatgtgcatttcttttttatggttatttccggcaagctttcctgccgtttcatgctacaaaggaaataacaagcggaatgacctcaaataccctgtcatgtattgtcatggatagtcagtttttgtcatggaggaaggggcggtgaaaagaaaaaaatgctttcccgaagggagtcgtgaagccagcctccctttggaaaacaggatatggaggacatccggttccatggaaaaagaaaaaatccccgccggcacatttcaagaccggcggggatcgcaataataaaggagcgggcttctcaacccttgatataaccgtactttttcaggtcgtccatgaaatgctccggcgtgtcggtcctcaccgtcaccccgtgcagttccctgtaccgcccggagaaattcaccatgtactccccgtcggtgcacccgctgtcaaaccagctgccctcacgcaggacgcgtacaaactcggaagggtcggaggcggcaatcctgccgccgtccgccaaaatatacatatgcttgttcatgccgataattttttagtcctcagtttataatatagtttctgttcatcgtccaggaaagggatgtcacggagcgcggtggctgcgggcacctgtccccttgtggcaaaggtaaccaatttatggagaaacagcacccagttacgcatttttgtgaagttggtcgttcccgaatgctggcggaactcgaccgtcttgtgccgtgaataagcttcgagattcaccttgtggtaacggttgccgattctgtttttcagctcgtccaccgtcctggccgagcgtatcgtctcatcagatacatggcccaatcccttgcaatagtagttatccctgcgggatgccggcatgaacctgtcgatgaccggttccagatgtttgtaactcagggccaggttacgccaggtcgccatgctgaaaccggcggcatcgatatgcacgtgaagcccgcagctctcgttcactttcacgtcacacaggtcaagcacccagcagaccttctccagttcccataacccggtttcaccgaccaggataggactgaccagctcgaaggtgtcgttaccgttcagactgctgtccgtcacgagcttccaatgcggacaggtggtatggttgtagccttctaccgtaacctcgataccggcttccctaagctcgcgggcgagccgttcacgggagcagttgtaagcctcgatctcgataccgaacttgcggttgaaagtgtaatccagtgcgactgtcgccggatgggtattcagaccgctctcacgctcactcatccggcgcagggcgttcactacaaaaccgtaattgccgttagtcaccattcttgcgatttccgcacggggaactcccaaaaggaacagctgccggatcttgcttgtctttgttgtttcttgtgctaaaatgcttctaacttgctcgttcataatttgttacctcctttattatactgctaaggtaatgcttttataggagaagtcgtaattataagagccttattatcatgctattagcttactttgtcttaggctaaaagtccttatttaaggtgtctgtaccctaacatccgctaccggtcggtgtcggatttttccagaccgatggcggggcatatctcctccaccagttcaggaaggccggagcctttctcctgacggggatcgggcgggaacagcgtggagcggaagacacccttgcagacagtatccgcctccctgttgtagcggagggtgttcgggatgtgtgaagacagcagccgcagccccatcctgtggatgacacggttccaggcatcatacaagtccttccggccccgcctgtccaccatgttccagaacagccggatccctttcaggttgcagttccccttggcgatcagctcctcctccagcaccttggcaaactgcagggaactctgcatgacgatgttgtccgccttgagcgggacaaagatatagtccatcgcggagacggtatggaccaccccctcgctgcggagcgttccgggaaggtcgaagagcacgatatcgaaagtctcccctttttcgtccatataacgccgcaggtcttccaccgccttttccgggtcgctcttgatgaccggataggcaggcttccggattctctcgtactgccggtacaggttcaccttcaggccgtcatttttcatgacactctccatgtccctctcacgcatcagggcgatgctgtgctgcggggagtcacagtccacaaccgccacacgcatacctttgcggtaatgcaggacactggccagcagtaccgtaaagacggattttcccacgccacccttctggctggcaatggcaaccaattcttttttcatcatacttctttttcattaaatgttaaacactattgtttcagaaacaaaaaaaacgatgctcccaccgggggagatcccctgtcatggggaacgggcctttatgaccggccgggcagggactcctccagaatcatgtccaccgtttccctgtattcttccagatgccgcgagacaaggtggttgatgaacccctccagcgtgaccttcccgtttctcgaggctcccgccagaatggacagtttccggtgcagggcggcgggaatatgcaacgaccggcgctgcacgcccgcaatgccatgcaggtattccttcccgtagacggacggctgtatggggccgtttttccttgcgggccgcataatgtcgttaccggacgttccacgtcccttccggggacaggcaggcgcttcccccatgatctcacggatgcggtccgcgtccatcccgccgggacccatccggtcttttacgttctttcctgtcatgatatgccttcttgatgacaacgttttatcggcgggccgttcctcccggctgtccgtcctcatcccagggacggtagacctcaccgagcagggcggcgatatcctccctgtgttcctccatatggagctccagcagccggatgataaagccggagatgctgccacaaccggcggccctgaccagcatggcgatccggcggtgcagtctcccgtcaatgtatgcggtcttccattcagcggccttgggagcgggaaccagaaacctcctcttgtattcttccgggtctgtcactttccctgcccccaccggcctttcatgccccggcatcctcatcgccggttccggggatggggaaacgggatctgacagaaggttccccgtgagtccgaccctctcgagaacgatatcggaaagccggttcttttctttttctgagttcatatcttaaaatcttaaattattaaattacacaactggtattgtatcggaatacaaaataaaggaagaagaggacaggacggaaccacctgtcacttatagtcatccaaagtcggttattgtcatgatacacatgacgctgcgttcgaacggttattcctatgcggaggtgacgtcagaggcccgctgccgtagcggcgtggagaagcggcgggattccgtttccttgtccaccggtccttttaaatccttatgggcaggtgtgggagcacacatccgtcctgatacggattcttaaattatcggtctgcagaagtgtataagtagtaacccattaatggagacgatgaaaagaagccataaggcgtacacggttacatgcccgttctccatttgcagaagtgtagaagtggtaatccatcaatggagacatgaaggaaaatcataagttgtacacggctatatgttcgttctccatttgtagaagtgtagaagtagcaatccattaatggagacaatgaagaaaaaaaataagtcatacacggctatatgcccgttctccatttgcagaagtgtagaagtagcaatccgttaatggagacaatgaagaaaaaacataagttatacacagctatatgcccgttctccatttgcagaagtgtagaagtagcaatccattaatggagacaatgaagaaaaaacataagtcatacacggctatatgtccgttctgcagaagtgtagaagtagcaatccgttaatggagacaatgaaggaaaaccataaatcgtacacggctatatgtccgttctccatttgcagaagtgtagaagtaacaatccgttaatggagaataaggtatggaaagagttgatttcccgtatattcgcctcctcatccccgaattatggacgtaagtcacatggttatggagagatatccatccttttatggggagagcagccggcaaatacctgatggaaatgccccgcaaaccacaggggaatagccttgcaattggctgatacacaataattattggagaaacgtggtccgctcctgcggacagcaagttgtgttttcgttaaacgaaaaccggacggtttaacggcaattaagccgctaaaccgtccgcttcctaagctccgaagtcgcctgatttatcattactggttattcaaataaatatattagtttgttcttttactgtcaggatcgtgattttacgttcctgaaggggaaccgttaatttccattaactgccttgcagtctcccggttgtaccgcatgactgtaaaatcatggatgcggctatcgccatgtccgtacaatgaaatgttaaatatcccaattatcaaaattcttttttcttcttttccattatcatacgaaaaatagtaaactaaaaaacaaggaataatgatggacaggaaaaaggaaacattactttctccattgttggatcggacactggaagcattgaaaggacaacgtagcgtgcggacactggagaattaccgcagcagtataaataaggtaaaggaatttgccggtgatggttgggaaagcctgacaatggaaaacatcacaaaatgctggacggacaagtatgccgcatggttggaaaagcgtcatgccgacaagcctcagacggcggacttctatctgcgtacgttccgggcggtgtacggtcatgcgttggctctttcttccgagggcacggatgggaagcctttcggcggacatcgtaccggcggatactttcctgctaaacgtgcgctccgaaaagaggaggtgcaacgtctgctctcgcccgacttaaggcagacattaccggagaaccagcgcgaggcattggatgtattgctgttcatcctctatgcacgggggatggtgttcaaggatgtgtacggactgacgtggcggatggtaacggacgggcatatccgttatagacgcagcaagacggacgtgtctattgacgtggagatagtgccggaactggaagaaatcatggaacgttaccacctggaagattcaccctttgtcttccctttcctgcacgaggcaaggaaaggatgtcccggaaaggagctgccggaggaatccgctttgcggcgaatcaatcgtacagcccgtatgatagggcggaaagtgggactctccgtacctcttacaacctacgtgctgcgccacacgtgggcaacattaatgttggaagacagccagcctgtggaactgatcagccagtgcatggggcacacctcgatacgtaccacgcagatctacctttcccgtatcagtagccggaaggttgatactgctgtggacggcatgtacgaccgtatgctacggaagcccaaacataaaagaaaggaaagggacatcccgtccggttgccatcgaaaatccgaatccggctcaccgcaaccgatggaaaacgggaacacacatccccatgtttcccaaactcccgaaaacgaaaaatgtccctttcttagcaagaaagagacattcgtttcgtgtcacgtgaacaccgtaatatttttcgctgcaaaggtatatatttcatacatttgcagcaaattttcttccgcttttttctctgtttcacctgatatttcttcctgcctttccgccctctattctttccatgcgatgtgaaacacattttcaaccgcctgtatcacagaattatataagtttatttcccgtaatgtctctttcttgctaagaaagggacgctcattaaagtgccaccaagatgtatggaaaagcgaaaaaatagacaggaaagcaaatcctgtttctttttcccatccaaatacggtgaaccgttgtatttgccgtactattcgcaaatgtacggcaaataggcaagaaaacataaggagacgataaaatgaaacaaatgacgaaggaaaggggcgggtcatgctgacgaaccccacacgatacgggctgatcgcctgccgctatctcgcatggggatggcactacggtgtatggctcaacgcaccggagatagcggagcgttaccgcatcaacgtgcgtgccctctcaccggcgttgctgcgactggtacaggcgggtatcctgcactcacgtgtcggagggccgaagccgggatatatgctctcacgcgaccctgccgaaataccgatgctggaagtggtacgcgcactggaaggaaccttccgcatggactgctgccgcacggtactcccgaacgtccagtgccagtgcgaagcggataactgtcgggtatgcggagtgttccgggacatactggacgagcttcggtcgcggctgtcgggtgtttcgctcgaagaccatgccgcaactgaagaatttctaccaacttactgggggggtaaaatactgcaaaccaataagatagaatacttggtttaaaacgggcgataacgcatgagaaacgagaactaaaatttaaaaagaaacgatatgaaaaaaagattcattccgtccctgttgctggcggccttgcttgccgggaacgcccaagcggaaatcgtgtcggacagcctccgcaccacgatctactaccgcacggcaagcgcacggctggagcttccctacatggacaacgaccggcaccttgcggcactgggcgacagcatccgttctcttgggggcgacccggcggtggtgctcaggcgcatccttatccaagcgtccgcctctcccgatggcaacacgaagtacaacaaggaactcgcccggaaacgcggtgaggatttacgggattatttaaaagacaacctttcgctgcccgacagcatctttgcactccaaccgcagggagagggctggagcgaactggctgaaaagctcggacgtaccgatgccccttggcgtgacaaggcaatcgccatcatccgtgacactcccgaatgggtggtacgcgagggcaaggtggtggacggacgtaaacgacagctcatgaaccttgccggcggtcgcgcatggcaatatatgaaagagaacctcttcgatagcttacgcagcggtgcactcgtggtgtgcgagatggaacgcatcgagcgcgtgaagcccaaacccgaatcggcacaggccgaattgaagccggcacccgaacaggcagtcgacaatgtgatgaaccccgatgacacggtggacaccgccgggaaggagcttgaaacgaccgccacgctttataacaaggaggacgagacgattccgcaggataacacgaacgaagaaatggaaaagagacctttttatatggcggtcaaaacgaacctgctctatgatgcagcccttgttccgaacgtgggactggaggtctatctcggtggtggctggagcgtcggcggcgactggatgtacgcatggtggagcaaggattcaaagcaccgctattggcgcatctacggcggtgagttggaagtgcgcaagtacttcggaagtaaggcggccgagaagcctttgcaaggacatcatgtgggcgtgtacgcgcaggggctgacctacgacttcgaaacgggcggcaagggctacctgagcgattttaactacggtttcggattggaatacggctattcgctgcccgttgccaagaggcttaatatcgacttcggtatcggtgtcggttacagcggtggcaagtacaaagtatatgagccggaggacggttgctatgtatacaaggaaacgaagagacgccgctggttcggcccgacgaaggcggaaatctcgctcgtctggttgttgggtcgcggcaacgagaacagcaagaaaggaggtacgaaatgatacatatacggatatacaaggaactgcacaaggcaatcgcaggatgtctggcggtaatgctgttgcccctgctcacggcctgtgagcacaaggatctgtgttacgaccatccgcactcggcgagcgtggaggtggtgttcgactggacggaagctcccgacgcctaccctgccacgatgagcctttacctctatccggaggacggttccgagccgatgcgttacgagttcaccaagcgtgagggcggtaccatcgtcgttccggagggtatgtacgatgccctttgcgtaaacagcgacaaggagacgcaccgcatagttgacaaggaacgtatggagacatttcaagtgacaacggggaacacccgttcactgcgtgggacactggccacgaggtcggaaacggcaccgaaggcacgcggcgcggaagaggagcgcagcgtgatggaacccgaggccctctggagcgaccatgccgagcggttggacatcggtcctgcgagcggcgtgaagcggatcgtcctgaccccgaagccacgggtgaacacctgctcggtggaggtcaggaacgtggagaacctgcgtcacgtaagtgcccttagcgcatcgctgacgggcatggctggcggctggctggcaggaattgacgagctgacaaccgagaaggtgaccatcccgttcgaggtacgcgccaacgaggacaagacgcagctgtcgggcaacctgaccttcttcggccactgcccgaaggaagccggagtgcacaagctgatgatttacgcgctgatgtcggacggcagcacctattatttcgaggcggacgtgaccgaccagctgcacgatgcggcgcaggacccgacacacatcgtcatcgtgatagacaagctgccgctcccgaagcccatcaccggcggcggaggtctgcagccttccgtgaaggactgggaggaagtgcacatcagcctgccgatgagctaagcagagaacaagtagaacagaaaagtaaaaagacaagtatatgaacaaatcgatttatatatgtgcggcggtagcaatgatgctggcttcgtgttccaacgatgagacagtggaactggcgaaggagaatgccatcagttttcgcagtataataggtgcgaatacccgtggcgtggtggctgacgttagtaatttgaataccctctgcgtgacggcctatcaaggaacagacctattctttgacaatgtcatattccaaaaggacggtacgggcttcttcaactctgccaagccttattattggccggaaaccggcgaattgactttcaccgtactttcaggcaactggagcagtacccgtgatttcagcagctctacggagcaatggatgagaaatgtcaccatcaacgatgatattgccaagcaggaagatatgacctatgtatccaacgtgataggaacgaaagccgcgaacggaaaagtgggcgtaccgctggagatgaagcacgcgcttgtacaagttcagctcaatgcaaagaacgagaacgctaactatgtgtataaggtgaaaggcatccgaatcaaccgtgttgcaaccactgccgacttcgacatgaagaacgagcaatgggggacagcaaaaggcgaggcgacttttgaaatcacttacgacactcccatagaattgacatcccaaccccaatctatcatgggaacggctggtaatgccatgctgattccgtacaagttggaggcttgggatggaagcatgaagctgaataaaccagagggtacgcttacggccagtgtgcaaccgcataaacccggttatactcttacagacggtggttttttttctgtcttgataaacatccggatgaaagccggagcatctgtctatccagacaaggaaggtggttacgcatgggctactgttcctgtgggatactattgggaaaagcaacagggcaagaagttcgtctatacgcttgacttcagcaacggtgcaggaatggtggatcctttagacccaggtcctgactgggatgcaagcaaagatcctgactatgcggtacccattctgggtggcaagatacgcttcggcgtgacggtcagcgagtggggcaccgatgacaagaacgtggatctgaaagacccagaaaagttcgatgtcacggtggacggctggacggacgacaagaaggacgctcccctgaaatgagtgcgtaaagtgagacaaaagattatcaatcaaatatttttttaattattcattttttaaattttgattttttttcaattatgaacaaagcaatttatttgtgcgcagcggccgctttggcgctggcatcatgttccaatgacgagactgtggaaatggcacagcagaaaggcatcagtttccgtgccgtgaccggactgaacacacgtgcttccgaagtgacaacaacaaacctgagtgcccttaaggttacagccttttggaataagaatggagacaagtacgatggttttactgatgaggttgattatgtaaaggctggtggtgtatttaattctgccgtttcaaaattctggccgaaagacgaaagtgaagtattgagcttcaccgctttctctgacaactggactggaacgaaaaacatcacggacaagaataacatcaacgtgggtggtgtgaagattgaaagtacagtagctgaccaaaaagacatggtatatgttacaggcgcgaccggaaccaaggctaccaatgaaacgaacggtgttcagttgacattggaacacgccctttcccagatccaaatctctgcaaagagcgacaatacggtctacacataccaggtgaaaggtatccgtatctcaaatgttgacggagaggccgacttcaatgtcgtaaatggtacgtggagcaacaacgctgcaaacgaccagatttatgaagtgaagtatgctactccggtaactttgaatggtactgcccaaagcatcatggaacgaaagcaggataatggcactgactacagtgacaatgccatgctgcttccgcagggagctactacggcttgggatgttgatgtcgacaagacaaataccaacaaaggtacatacatctctgtactgttgaaaatcaagaaaggtactgaaaatgttttccctgctgaaggtgatgatacttacggttgggctgccgttcctgcttcattcacttgggaaaagggcaacaagtatgtctatactttggacttcaccaacggtgccggacgtgttgaccctgtaacccccggaccagacgttaaaccgcaaccggacggaaaagacccggacaagggagacaagattttaggtgacccgatcaagttcaccgttacggttactccttggaatcccaccgataacgatatcaatatgtaatccgatatccatttaatcaaaaatcaataaccaaaccgcacttccgcccggtggctgtccgcacactcagccaaggcaggaagtgcaccccaggccggacggggttgaatgtccctttccggtcacacagaaaagacaatctaaaaaaagaataactatggcaaataaagcgattcatgtattggcggcagcggccttgcttcttgcctcgtgctccaacgacgacacggtgcaggtggcttccgggaaaggcatccgtttccgtatggcggtggatatgaacacccgtgccctctccgctgacctcgccgggctgaaagccaccggcttcagcgtgtcggcgttcgccacggccgacaatgaggagaagtatgggttccggagcttgctgttcacgtacgaggcgggcacggagaacgactggacgtccgaccccttgaagtattggccggacgacggcagcgagctgcgctttgtggccgcctgtcccgcagccgcggactggggaggcacctatgagggtgacaagcccggtgaactgaaagtgaccggcttcagtccggcagcggacatcaccggacaaaaagacctgctggcaggttatgcctcgggcgataggaacaatgccgccaagacggagatagagttgcgccatgtgcttacgcaggtagaggtacgtgccaagaacaccaatgcgacctaccgctacgacgtgaaggcggtacgcatcggttccgtccattccacgggcgactacacgttcccttcggaaacaaatgccaacggcagctggacactgaaggacggaagctacgcctcctatgccaccgcagagctgacagatccgatacgcctcacgtctgacgcgaaaggactgatggacgacagtggcacggcgatgctccttccgcaacaacttacggcatgggacacgaaagacgacaaggaaaacaaaaagaacggttcctatatcgccctgctgttgaagataaccactgaagcgggtagacaggtctatccctccgccgagggtgaatacggctgggcggcagtgtccatcggaggccacgcggagagcaagaagaacctctggcagccaggcgacaagttcgtctacacactcgacttgagtaacggcgcaggggtaacgccccccgacggccccgatcccggcgaaccgatactgggacaacccatccacttcacggtgacggtgaacggctgggcggttcgccatcaggacgtgaacctgtaagacagaaaacgaattacgaataaaaaacgaatgacagatatgaactacaagaacaaactgatgagtctctcgctcatcctattggcgatgttctctgcctgtacggacgaggtggagaacggaggccgtgactcgggcacaggcgaccaccgcatcacctttgccgtgggcacggcagcccctgatgcccggacacgggcggacgggagtcgctctggtaccaccgaatcatacgaaaccagctccgtggagatgcagggcaaactggacgggaaaactgtctacctcaccgccgaagtctccgacggtttcccgggcgatgaccaacccttgacacggggcacgcaggtgacgggggtcgcacaggtggatgaatttagcgtgtcggccactgttttagatgctaacgcttttgaacccgagacattggatgtgatgtacaatgtgaaggtggcgaaggacgacgcctcttccacatggactaccgggacaccatactactggcctaccggcaaaaaactgactttttttgcctggtatccctacaactcgaagaacctgaccatcccgaaagatagcaacgtcaaagacacgaaactgttttatgagatacccgaacaggtagccgaccaagaggactttatgatggccaacagctatgaagtgagcgagacatcgagcgtgccgatttttttcaggcacatgcttacggcggtgaagttcaagacgagcaacaacatccctgcctgcaccgtcaagtccatctccctgaaaggagtgaaatacaaaggctatcataactggcaaacacatggcagcggtatattaccttgggatccggatgctgacaccagagacttcaccttggactttcccaatggaaaggaggtagccgagaataccgagaccgaactcacgggaaagggcgagactttcttcatgatgccgcagacatttggagatgacagcgaagcccgtttggaagtgacgttggagatgaatggcgtggagcagaccatcggtgccaaactgaaggatcttgccaatgcttatggttcgtcagtttggaatctgacaacaacggttacatataatatctcgctcgaccagaatgtcgagttggaattgaacaaggatgtcttcgtggcttcgggtgccgacgctgtgatttatgtgaagagcaactgtgactgggagtgtacactgagcgacccgaacggcatcaccggcagcgccgcaccggccttgtgcaagccgacgctgaaaggtagcaccagcggagtgcagtcggacagtttcgataatgaaaacgcgaaactcacccttgaaaccatccaaccgaccgacactgagacgcgcaagggcaaggtgaagctcacgtttacgttcccttccaaaccgggaaagacggtagagaaagaggtgacgctgacttccagtctgatggtggaatatccgacaggaagtgacatctggtacaaactgtcccaagggtctatgagttgccacgacttgatgaccaccgatacgcccaccttgcccgataatgccgactttgccacggccatagccaaggtggtaggtgccgatgtgacatatagccgcgaactggtagcgacaagaactggaggaacttcttatgatggcgatccggccgtcttcacttacttcggtatccgcagagccaaagctgacggttcgaccatcgtggtgaacctttccagaatcaccttggagaactatggcggttcaactttcgatgaaaagaacttcatgacttggggtggaacttactatccagtaggtagcacatggacggtgaccaaagacaactataatgtgaagactcacgtagacgacatgggtacggatttgtctgtttggtaaagcactgccatgggtaactggggatatgaccaagcgtatgactatagtagttctactttccgctatcccggttactacaccatcaagaataacaagttcggctactactccattgaaaaggtctcaaattgagaaacaggcaaggcaagatcaataacagtttgaacaataaaaaagacaagatatgaactacaggaataaactaatgaacctttctctcatcgcgctggcagtattctccgcctgttcggacgaggtggagaacggtactcacccgggaaagggagaccagcgtttgagcttcgccgtaagcatgggaggcacgaacgcatggaaaccgacagccggcacccgtgcggcttccggtttaggggagagcacgtacgagctgaaacccattgagatggaaggcaaggtgaacgggaagaccgtctaccttaccgcagaagtgacggacggatttcccggcgacaaccgtccgatgacgcgcggcacgcaaatctccgagaccaacaagacggatatggagacctttgccttatcggcctataccgatgccaccggcacgcccgacttcatgtacaacgagacggtcaccttgaataaggacgaaggccgttggtatcccacggggacatactattggcccggcaagaagcagttgagcttctacgcatggttccccagtgcggcggacggcatgacgctcactggcaataccgatgttggcgcacctgtgataacctataccgtgcccgatgacgtgaagaagcaacaggacgtgatgagtgctgcagccatcggaaaggataatccgacggcagacggtttcgccaccaccgacctgacgttcaaccacgccctctcggcagtgaagttcgtggcaggggatgacctacccaactgcgtggtgaagtccatcaagctggatggcgtgcgctacaaaggtacttacacgttaggaacggacgcatggacattgactgatgacacgcaagcctttaccctacgtttaaacaaagtggtggcaggaaacggtggagccattacggaggatggcaaaggcgagaccctcttcatgatgccgcagacattgtccgacgacgcgaagatcgaggtggtgctgaatgacggaactgccgactttacggtgggcgcatccattggaggcacgaaatgggaaatgggcaagacctatacctaccacatctcgaacaattttgtgtcgctggttaccaccaacgacaagttcgttgcctttacggatgaaaccctgacggatcaggtggctttcttcttgagtgcgtccgcaactactgccgggactacgggtgaaatcttagccccggctggagtaaccgttacacccaccacttttgcaagcggagcgtccaacctccccgtgaaggtcacttggcccaaggacatggggaattatgtaagcatggagatttctttcgctggcaagaaaaaacggattcttatgtcccgccagacacccaccgaaggggatgcctattggctctattccctgcccgagacgaccagcctgcacttggaaaatgacatcatcggcttgcagaacgcatcggaatcggactggatagccatgacctcgtctcctacgtacacgaaggacaattattcgcaggtcatttatgacaactcctcaaagggcgacatttacctgcagacgttgagcatcccgtcggcgaaccgcttcgcctcgttgcttgccaccaaagaggactttgaccaaaatgtgatgtactgcgtggagcagaaagcctttaccgccgatttcggcttcaagggctgcgaacgaaatatttcccgcgaatcggagaaatggaacatcgtgctgaacggcggacatttcaaggacaacgtcacaaacatgaaagccagagtggtaatctcctccgatgtatctgatgagctgatcaacgatcagggacgtgatcttacttatggcgaaccggtgtctattgtcgtaaacaaaactacatctatggctgtgtccgccactccttacgtgaagaagcgttgggacaacctgcaaaacaatacggccaataacggcacacgcaaggtaaacgtgcaggtgaagaacgacggcatggacgagtggtacgattgcggacctgacggattgatgagtgataggttcacgtggggaaataattttgcaataggatataaccaataccacggaagaggtaataattggaataatggtgcacttccaatagtccgggattattatgaagtgcatcagaaacacccgatgtttggcttgcacagatggtctataatgagggacaacggtgatgcaaatataatggggaacgccctatatatgatattctgcagtgccagacagtggaacggatggaataatggaagcatctaccgcaatagtacgtctgggggatggtcatacattgcatgcaatcaggcaaacagcattactgatcctgaaaatcccaattacaatgatgtctataatggcggccgattcatcaccattggcgtaaatggtcgtaactggagatggtcatcttggcaaaactatccgggacctcttacagtatggattccggtagtatacactgactcccattgcggattgaacgcacgccctacagacggcactcccattcccggaacatcggttaacgaatagtggcaaatcgctttaataaccaacaagattatatatacactttaattacatcaagactctccccagcacagcgggagggattatgtataataaccctacaacttcccgcacttgtgaaagaccgggaagtttccctaactattaatacataccctcaaatccgcaactacgcgcctaatatgatacagaagcgaaaagaatctgcatcgttagtaaaaagggggcacagtgcatcgaatgtcaccataaagacatataaatgccccttaccccaccatgcgacttgaggcaatacgcaaaatcacgactataagttgtcggtgttatccaaagtcattctggaacacattggcataagcattgttgcatgaatagatattcagcacatacttccttgatgtcctgacccatttggctggcacagagatgaacttaaagacaaacgtcttgatgcggcttgttgctttgagtccgaacctcttcacgtcaagcctcgccatgatgaatttatagaagttgcgtatgagtgccataagcagaagaaacaccgtgttttctcccataaaggattttggaagcctgttccagccgaatccgttattcatatcatcgaagatgcgttccttccctccacggaggttatagaattcgacaatctctttctcggaagactcgtagtcatttgtaaggatgcagcggtaggtgtattctccttcccacaggtcgagttcgccgtctatccgcttctgtctttgaatcacaagacggtatgccttccctttccatttctcgatgagaatggaggccagctcaaactcaatgccgcccaattccactttcttccaacctctgagggcaaagatgtcattgtagagcgaactgcatcggttagcacggatatagaaggtcttgcagtgtttagcaatctcttccactatctcttcagaacacgagccgcaatcagctctgaaacggttgataataagcttgttttgttcaaacctttcaaagaacctcttcagcgtgtccttctggtggaaacggacatttgtgttgccgtcgctgttctcaatgccgacaatcaagttgccaataaccgccacgccagggcgataaccaaggaacttcttgtatgtaggcttcgcatcaaacttctcagcctctatgaactggtggtcgaagtcaacgtcatacccctcgccctctttcagctgccctgtggacaataggcaattgaggagcagtgtattcagcttgtctgccgtgttgaagtcgtaggtcttgccagtgtcggatgtgtaggaaatgttatcctgggtcagttcctttatggctctaagaatcgtgtcggcactgcatgtgcgaagtgtcggatgaagcgaaaggtggtacatcagatgagtggtgacatcctcgatgcatgagccgccacaaaaataaacgctcataagcgaacggatgatttcgctgtattgataaccatacagcctgcatctcataccgagggttgagtcgattacagatgagagtctggagtcaaattgctccattattgaaaatattcctccaaaaggagtgagtttctcggatttaattgctacctttgccatgtctgtcgggtttgatacatattttgatttgcaacactaagataggtgaaaaatctgacatggcaaattcctgagcaactttttgttgctcaggtacttaaaaagttatatttgtaatagtgttgcggaattaaggcatacaaaagacagatggaaacaacgaagatacttgaaagggaaagaaacaacaaggatgccgtccacctccactggaacgaggcggacgagacatggaacgcctacggcaaatcggcggaaaacgcccttgccatcaaccgggaactccgcacgctgacggacaaagcggagctggacggcacagaggtgacacacctgaaagtgaccaccgaacagttcgagcggtacggccttgccgactactgcgtggcggtggacgacgagagattgaaactgaagatacccgtgcatggctgaacgaacggacatgaaggacttcgccgcaaggcttgaggaagaggcggaaaagaaggtggagaagatagaggccggagacctgaacatgatcaagaaatcattcgaagcctcgttggtgctcgcggacgctttcctgcaactgaaagccttcatcgcggactatactttccgtgacgaggcagaggaaatcgagttcttcaagacggtcaaaccccgaatctgccaccggctcatctactaccgcaagatatacaacatcgagatgaaccgtcccgtaggcaacgagtcacagcggagctacctgatagacgagatacggggcatcaaccgttacaacgagaaacgttcggacttcgtgcgttactaccgctccgggctgacccacttggacgcactctattacctgcggggtaaccttgacacggcactctacttggagtcgttccatcacgagcgtgatccgtcattctcgaccaactgtgacttcatggcggcacggcttctcgccaacgagcggctgatccgctacctgacgaaagaattagaggcgttcgaactgcggcaagccgaagaatcgttgctgaaggtgcgcctgacgtggaaagcgacgaagacggaactgaccgaactgctatttgcattggacagtcgcaaggcattcggggatgtcccgttgacaaggctgtcggagtatgtgcagagggcattcaacatcgagttggacaagaacctgtcccggacattcggcgacctgcgcatccgcaatcggcagacgcctttccttgacagcctgaaggccgcactgctcaggcggatgaaccgcccgctgaacaaccgccccggagggcggaacaaaaagacgctttgagaaggataagaattgaataataacaaacagaaacctaaatagaaaaggacaatgaaacaggtatttatcaagacatggctgctgctgttcgtgttactggcagcggcagcctgcgacaaggacgagagggaaatcggctacgacgcgctgccccaaaaggcgcggcagttcatcgcgcagtatttccccggtgcggaatgcacccgtgcggtgcgtgacaaggacggcggcacgaccgaatatgaggcatggctctcggacggagcggaactggagttcgacgaacagggcgagtggacgagcgtggactgcaagttctccgcgctgccggacggcatcctgccggaatccatcgcgacggacatcaccgcccgttaccccgatgccgtaccttacaaggtggagaaacaaccgggcggttacgagatagacatccccggctgggaactgtactacagctatcaaggtacgttcatccgtgccgaaagggactggtaaaactgcatgaaacaccaataactaaagagctatgatcatctatgacagcaaaatcgcccgtctgctccaaggccggctgaatccctacgattacgtgaccctcccgatcattaccttgaccgccctcccctacggagagaaaggaatttgggaggaaatggagatgagcatccaccgccgccagtatacagaatgcttccttgcgtcactactgccgtccctgcttctgggctggcaggtgtgctggggacttgccgtcctgccactgttcatatattacatcctctattgggcggaacagttggctgtcggccattcggcatttgactacgaggcagaaaaggaaagcgaggaagtaagctactttgtagtgagccttaattccgcaacactattacaaatataactttttaagtacctgagcaacaaaaagttgctcaggaatttgccatgtcagatttttcacctatcttagtgttgcaaatcaaaatatgtatcaaacccgacagacatggcaaaggtagcaattaaatccgagaaactcactccttttggaggaatattttcaataatggagcaatttgactccagactctcatctgtaatcgactcaaccctcggtatgagatgcaggctgtatggttatcaatacagcgaaatcatccgttcgcttatgagcgtttatttttgtggcggctcatgcatcgaggatgtcaccactcatctgatgtaccacctttcgcttcatccgacacttcgcacatgcagtgccgacacgattcttagagccataaaggaactgacccaggataacatttcctacacatccgacactggcaagacctacgacttcaacacggcagacaagctgaatacactgctcctcaattgcctattgtccacagggcagctgaaagagggcgaggggtatgacgttgacttcgaccaccagttcatagaggctgagaagtttgatgcgaagcctacatacaagaagttccttggttatcgccctggcgtggcggttattggcaacttgattgtcggcattgagaacagcgacggcaacacaaatgtccgtttccaccagaaggacacgctgaagaggttctttgaaaggtttgaacaaaacaagcttattatcaaccgtttcagagctgattgcggctcgtgttctgaagagatagtggaagagattgctaaacactgcaagaccttctatatccgtgctaaccgatgcagttcgctctacaatgacatctttgccctcagaggttggaagaaagtggaattgggcggcattgagtttgagctggcctccattctcatcgagaaatggaaagggaaggcataccgtcttgtgattcaaagacagaagcggatagacggcgaactcgacctgtgggaaggagaatacacctaccgctgcatccttacaaatgactacgagtcttccgagaaagagattgtcgaattctataacctccgtggagggaaggaacgcatcttcgatgatatgaataacggattcggctggaacaggcttccaaaatcctttatgggagaaaacacggtgtttcttctgcttatggcactcatacgcaacttctataaattcatcatggcgaggcttgacgtgaagaggttcggactcaaagcaacaagccgcatcaagacgtttgtctttaagttcatctctgtgccagccaaatgggtcaggacatcaaggaagtatgtgctgaatatctattcatgcaacaatgcttatgccaatgtgttccagaatgactttggataacaccgacaacttatagtcgtgattttgcgtattgcctcaagtcgcatggtggggtaaggggcatttatatgtctttatggtgacattcgatgcactgtgccccctttttactaacgatgcagattcttttcgcttctgtatcatattaggcgcgtagttgcggatttgagggtgagaaaacgctttgcatggagcaaatggtattggaaaaagaagctgccggccatcgaccggagctggttctgctaaaggaacagggctggctcctatacagctactacaagcgtgggctgctgtctgtttaagttgtgttcgggcatcctggggccttctttatgattaaacgagatgcagccaacgcttcctttcatcacattcctctattgggcggaaaaggaaagcgtggagataaaaaaggaaaaagtgcaattcagacatatatacgaagagttacgatgaagaaaacggaatgcgtccttgtgaaaggtcgccagatgtccgccgaagggtagcaatgcccgtaggacacagttttttgatttttaggaaagttcaatccccaaaagggattggatttattaagtgggaaaccacttttttacatgagaaaacaagacccgcacttgtgaaagcccggagcttgtactttagcatggcagcctgccagctttaccccggcaggcttgtcatagagatatttttcaacaaaagttagttcacttcgcatcagcggatgcggtacaagtgaaagaattcaaaatgtctggaagcttccacctgttacagtccgaagcttccgtttttttatatggacagaataaattcaaaaacaagaacgatatggcaacattaaaattgaacaaattcatacttttgccgtgtagggcggcttccgccctcgtgcgctgcggcttcccggtgagtgcggggatcatgatgaaaacgttttcccccgatacgggccgtatattttacgagaacgccgtgtgtgacttcctgctgcacaaattccctgaaatcgtgaggtggtatgaggactgcccctgcccgacaggattcctcacggcaggttcaccggtatgggtgttccttcctgaagagggaaaggaaggcgacgaacttctaaggtcggtacgcaaggagatcgacaatcgccccatacgtgtgatcacccgtgagaattaccggagacgtatgtgcctttccggccagctcatcaaacggctcgaccgcgcaggtgacgacatgctctccgagttcctgtgtcacaccctgctttccaagcaggacggcacgtatgtggactctcgcagatgggaaagcgccaagaaaggtgacccggtgcacggcttcatatccgacatgctggcggcgtgcctctccgccagcatgcccatcgtggacggtgacctgcccggcatcctcacgcggatggcaagacaccatatcccgagtgtcagggcgaagctgagagaacaggacaggatgatcctgcaagcctgtccctcgctgaatgaatatcagcatgcaatgaagtagaaaatgcgtaccttataaatgcagacgaaatataaaaacaagctgcgaacgttattcttcttaacttaaaatgttggaacgccaatatcaaatattttatgcttttgctggttattttatctgtgtaatttgtggatattatatagaagtatgtatttataaataaaaatcatgaacaatggtataatatggttgaagttaaaaatatcgttcggttatgccatcttggttctgttgtccgcattcattgtctatcagttccgtcaggaacaaatgcaaagacacatgctacgtaagaaggagaaagagctggtggcgatacaccgtctggctgaaagaatctacatcgacctgctggacctttccacccatgccgagattgccgtcacatgggatgatgacgacctcggggaatacagccgcaaacgccacggggtctgcgacagcctgcaacttctgaaagaatatgtccataccccgttacaaaaaacccatatcgactcgttgtgccttcttctttggaacaaggaacttcttttatccaaggcggtacataccttcaaggaactgcaggacataggtgacattgtacaagaaagcattcctgccattgtcttgacagcccggaaacaggctgcacggcaaaaggaaaatacggcttctccggaagccggtgcgggagatgtacctaaaaagaaaaggagtttccgggatatcttccgtagaaaagaaaacaaatccgcttacctgcaacagagggaagaggctgaacgtaaacggcaatccctgtccgttccctcttcaaccgggacgacaacacgcatgctccgctccctgaatgaaagggtcacccgggaacaggctgaaaggcgggccaggctgctggcacagatggacagcctgtatgccggcagtgtggagctgaacgggaggatgaacaatatgatctccgaatttgagcggaaaaacaacgaacgttttaccgcacgctacagggcctttgtccttgaacgggacaattcctaccatatggtggccggccttgccctgtccgtctcccttctggcgatcatgctgtataccgtcatacaccgggacctgaaccgccgtctccaatacgagagggagcttgaacagtccgacaggcggaacagggaactgctccgctcacgcaaggagctgatggcctcggttgctcacgacctgcgcgccccgctggcggccgtcaaaggctgtgcggaactgttaccctcggaaagcgacgtcagccgcaggagtggctatctggacaacatcctgcactcggccgattacatgctcggcctggtaaacacgctgatggaataccaccggatggatgaaggcgaagttcgctccaatgacacgctctttagcctaaaagccctgttcgaggaaatagcggacagtcatcgacttatcgccagacagaaggacctggcgttcaccgtatctttctccggcctggatgccgtcgtctgctgtgacagctcgcatatccggcagatagccggcaacctgctgtccaatgccctgaagttcacaccccacggggaggtgcgccttgaggcggaatacttgtatggggaacttagcatctctgtccgggataccggcgtgggaataagcgctgaggagaaagaacggatattcggggcgttcgaaaggctggacaacgcgcgtaacattcccgggttcggcctggggctggcgatcacggtccggctcgtatctgaaatgcggggccgcgtggaggtaaagagcgcccccggtgaaggcagccgcttctccgtattccttcccctgccaccggccggacagtcctcccgtctggaagagaaggtgtttccgacctgcgaactgcccggcgtcatccgtgtgttggtcatggatgacgaccgcatccaacttaggatcacccgggagatgctctcccgcagccggattcactgtgactgctgcacggatgtccgggaactgatggactgcctgaaaagtcaggagtacgaccttctgctgaccgacatacagatgcccggtgcggacggcttctcggtccttgaactgctgaggggctcaaacatcccccgggcaagggagattccggccatagccgtcacggcacattccgacagggaagaggaatacctcttcgcaggtttcgccggatgtatccataagcctttctccgcggaagggctggtgaccgccatcatgcgggtcataaaagggaccgggaaagagtggaggccggacttctccctcctgcttgccggagaggacaaccggcaggaaatgctggggctgtttgtcagtgaaagccgcaaggacatcgaaaggctgtcggccgccgtgaaagaaaaggacagccgggaaatcatttccatcctccacaagagcctgccactgtgggagacggtgcgtctgaactatccggtagcggacctgtgggtgctggtcaaatccgacgcgggccaatgggaggaagaggaatatgtgaaaatagaaaaaataatcggtgccgtcagggaactgatatcctatgcggaactgatgcagaaagagggaaaggaatgaaaacgatactgattttggaagatgacgtgattttcagccgcagcatcggcaactggctgaagaagaaagggatggcgaccgaacatgccgcgacgctgtcggctgcccgcaaggccctttccgcaagggagttcgaccttgtccttgcagacctccgcctgccggacgggaacagcacctccctgctggaatggatgaacgagaggttctacgccaccccgttccttatcatgaccaactacggtcaggtggagaacgcggtggaagccatgcagctgggggcggtcaattacctgtgcaagcctgtccagccggacaggctgctggaagccatcgggaagatattcagccgtccccgacatgacgggaacgaattctatcgcggggagagtgccaaagcgcgggaaatgtaccagctagtggggctggtggcacgttccgacatttccgtgctcattcggggagcctccggtacggggaaggagcatatcgcccgcgagctgcatgaacaaagccaccgtagggacaagccctttgtcgcggtggactgcgggaccatcacgggtgaccttgccaaatccgaatttttcggacaccgcaaggggacgttcaccggtgcctacggtgacaggtacgggctgtttcaagtggctgacgggggcacgctgttccttgacgagatcggcaacctttcccccgagacacagatgctcctgctacgtgccctgcaggaaagacgctacaagcccgtcggctccacccaggaatacacctttgacgtccgtctggtggccgccacgaacgagaacctggagagggcgatatccgaaggacgtttccgggaggacctgttccaccgcctgaacgagttcaccatcaatgtcccccctctctcggaatgcggggaggacatccttccgctggcggagttcttcgtgaagcatttttcagaaaagcaccgtaagcccgtacgcgggttcaacagcctggccgcggcctcattgcagaaatatccctggcccggtaacatacgcgagctgagaaactgcatccaacgtgccgtcctgctctctgccgacggatggatctcaccggaggaactgaatctggacctcgccgtcggacgggaggaaaccgcccccattccggaggaaaaggaaaaacagctgcttctcaggacccttgaagaggcggagggcaaccgtgcccgtgcagccaggatactcggcatcagccggacttccctgtacgagaaactgagaaaatatcggattatatgagcgggccgttgtacaatacgggccagctccgtgagtctccttccggaaccacagcgaaatgagagtgtcatacaagcggccggacatggtttacataaaatgtacatccgccttacagttattgtaaagcggtgtacatttctttttttgagcctgttttcaactgatatttttatcatgctgaatatctgactattaacaagaaaatgcaataggcatccaccggatggcatcatattcgcctttaatattctgtcgtaaggcatgaattgttaaactaaagtttgagcatatgaaaacatcaacaacacaccgcctgctgaaccatctccaagaagccgtcctggaaggaaaaaatgctatggaaaacgtattgtcatccgcctacgatgaattttcagaccatctggcctccctggcggaaagcgggcttcccatccccaagaggctgcgccgcctacgccacatggagacggaactggacgcctatatgaatatggccggaagcagggctgacagccggacacatatctatctgatgaaggcatccggccttgtcaggacggagatagaactgttgcatttcgcgcttcggtatcccgaatgccgcgataccgttcccgataccgacaagggacggacaggcctgttctcccttcgttggaaaggttccctggtgaacctgatggaactgatcgcctcactgcactacctgggagtgataacagacggtaacggcaatcgccagtcattcgcctccctggtggcggcattcgaggagttcctgcatatccgaatccccaagccctacgatttgcgtgcggaccttgccagacgtaagaaaaccctctcggtactactcccaaaactccgggaagcctttgaaaagaacatcataaactgcgggatcgggaacggatgacagagcggaaaatccccctgtcatgaatagtcatcccctgtcacgaatagtcaccttccgaaattaggctggtattcgaattatcatttactttgcccccggtaaaaacatcaataatatggctaagatcaaacaggtgtacaagaaagagagaacggccgcctcccggacatgaagaggcggccgcagtccgaaggaatcctccgagctccattccttttactacggattccgtctgaacgagttccagaacatcgagttcgagcggctctatgagaattccggtgccgtaaccaagtcgcagttcatcctgtcggccattttcgacaagccgatgaaagtggtgaaaatcgacaaggcggccacggactactgcatcaagctcaccaacctgcagagcgagtaccgccgcatcggggtgaactacaaccaggttgtcaaggcggtccacagtggggaactgaccgaaaagaaagccctcgccctgctttacaagctggaacagctgaccgtggagctcgtatcgctgaacaaggaaatcatccgtcttaccaaagagttcgaacaatggttgcaaagataacatccggtgccgccatctacggggcgctgtattacaatcaggaaaaagtggagaaagggaaagcgcggacactggcatgaaaccgcgtgatggagacaccggatggaaaggtcggcatcgccgaatgcatgcgcagcttcgaaccttaccttgccgtgaaccgccggacggaaaagccggtgatccatctctcgctcaatccccatcccgatgacgtgctctccgacgaacagctggaagccatcgggcgggaatacatggacaggctcggatatggcgaccagccttacgttatcttccgccatgacgacaacgcgcgtcctcacatccacatcgtctccctgcgtattgatgaacagggaagaaaactgagggattacaaggaatgggaacgctcaacggacatctgccgggagctggaaaggaaatacggcctgctgcagtcacgcggggaggaatacaggatttcccggccgataaccgcggtggactgcacgaaaggcgaactgaaacaccagattgcgggcgtggtaaaaccggccgtgcagaattaccgcttccagtcgttcaaggagttcagggcgctgctcgggcttttcaacgtgaccgtggaggaagtacacaaggccgtggacgggaaacgttgcgacggtctggtctatgcggcgaccgacggaaagggaaaacgtaccggggtcggaatcaaatccagcgatatcgggaaaagcgtgggataccgtgccctccaaaagaagttctcacaaagcagggcatggatgaaaaagcatcccctgccggaaaagacaagggaaaacatccgcacggcactctgccgggatacccgtgaagggtttctgcacgagctggcaggcaaaggcatcgtgcccgtactctgggagaacggggcgggcgtaatctacggcgtgacctatatagaccataataccaggacggtcttcaagggatcggcactcggcaaggaattctccgcttcggttatcaaccggaaatacggcacgctcccgtccgtctccgacaagccggcttcaggacaggaaccgcccgtgaatacggacacaagggaggcagggcttgcggaaggcctgctggatctcttctccatggaatcctgtccctacccgtctgaggacatcccccggaatgtttatggaaagaagaaaaagaggaaagggcggaaaggcccgcggatcaactaacgaagtattcacatataacaacccatcataccccatatggcacaagaagattccagagggctcggcaagaccatcgacttcatgcgggcggtcagcatcctgcttctcgtgatgaacatctattatttctgctatccgttcttccatgccgccggttgtaccaacggcatggtggacaggatactgctgaacttccaacgtgacacagggctgttcaccggctcccccgtgaccaaatgcttcagcctgatgttccttttcttctcctcgatgggcgccaaagggcggagggtcccggagatgacatgaaggcgtatcggctgttacctggcagccgggctgctcctctattggggaagcgagcttttcctcactgccggctggagtgtcccgctcaccacccttgcgtatgtgtccgcccttaccgccggatacatcagcctgctcaccgcaggcatgtggaccgggcgtcttttaaaggaacacctgatggatgacgtcttcaatgaggagaacgagtccttcatgcaggagacccgcttgatcaccaatgaatactcggtgaacctgccaacacggttctattacaagaagaaatggcacaatgggtggatcaacgtcgtattgccccaaaggggctgcatggtggtcggttcgccgggcagcgggaagagctactgtgtcatcaaccagttcatcaagcagcagatagagaaaggctatgcgctttactgctatgatttcaagttcccggacctgagccttatcgtctataaccatctgctcaagaacaaggacaagtacaaggcgaacgtccagttctacgtgatcaatttcgacgatccgcggcacagccaccgctgcaaccctatcaacccagcattcatgtccgacatcgccgacgcctatgagtcagcctatgtaataatgttaaatttaaataaaacctggatacagaaacagggtgacttcttcgtggagagtccgatcgtattgttcgccgccatcatatggtatcttaaaatctacgagaacgggaagtactgtacctttccccatgccatcgagctgctgaacaagccctactcggacatcttcaccatcctgacctcgtacagggagctggagaactacctctcgcctttcatggacgcctggaaaggcggggcgatggagcagctgcagggccagatcgcaagtgccaagatcccgctctcacgcatgatcagcccctcgctctactggattatgagcggggacgacttcacactggacatcaataacccggacgcccccaaggtcttgtgcgtgggcaacaacccggaccggcagaacatctattcggcggccctggggctgtacaacgcccgtatcgtcaagatggtgaaccgtaagggaaagctcaagtgctccatcctggtggacgaggtcccgacgatctatttcaaagggctcgacaccctgatagccacggcccgcagcaacaaggtggccgtctgtctgggcgcgcaggatttcagccagctggtacgcgactacggtgaaaaggaggcgcgcgtcatccagaacaccgtcggcaatgtctttgccgggcaagtgttgggggaaacggccaagaacctttcggaacggttcgggaaggtgctccagcagcgcaagtccgtcaacatgacccgtgaggacacatcgaccagcatcagcacccagctggactcgctgataccggcctcgaaaatatccaacctctcccaaggcatgttcgtgggaagcgtctgcgacagcttccaagagaagatggagcagaaaatcttccactgcgagatcgttgtggacaacgcgagggtggcggcagagacgaaagcctacaaaccgatccccgtgattacggactttaccggcagggacggcaaggaccatatgcgggaagagatagagcgtaactactaccgcatcaaggaggaggtgggcgggatcatccaaaaggagctccgccgcatagggaacgacccggacctgaaacatctgctggaaacggaggatgacgggcaacaatagttttaaccattcattttaatttatcgaatcatggaaaagaagaaaaacagcgcgggctgtctacccggcaaaccctgcttcccctgggtgggaggcaagagaagactgcttccggtactgatccagtcactgccggaaaatatcacggaaatggaaacttatgtggaaccctttgtcgggggaggcgccctgttcttctgactgagacagacttatccgcatatccgttgcgtgatcaacgactcaaacgagagcctggtgaatgtctaccgtgtcatacgcgacacgccggaagaactggtcggactgcttgccggcatccagagcgaataccacgcccttcagggacgtacagagagaagggactatttcatggaaaagcgcagggtcttcaacgaagagcacccggatggcatcacacgtgccgccctttttattttcttcatgcgcacctgctataacggcatctattcggtcaaccgcaagggccggctctcggtaaccttcggtacgggcagccgcgccagaatactggaggaggaactgatccacttcaaccacaagctgctgcaaggcgtcgtcatcctggacggggactaccgccagacggaaaaatacgcgggagagaaatcggtcttctacttcgacccgccctacaaacccgtcaacgaggccggtgcctgtacctcctacatgccggacgacttcgatgacgactgccagatagagctggccggattctgcaaggacttgggagagaaaggaagcaaatgaatgctctccaactccgatccccgtcagaagaacccggagaacaccttcttcgacgacctgtacgccggcttccatatccagcggctgagcatcttccgttcggtatgttccatagccgagaagagggagacggtcaatgaactgctgatcagaaattattagtaccggtcatactctatgatgcccagtttgttgatcaggcggaaaacactgaaatcaaacccgctgtcctgcagttggagacacacgtgttttccctgcaggccagaatgaggaaactgataaaggattacggaacgcgtctaatggcctggggaccactggcacaaggcacagaccggattttcacaaatgaaacgctgaaaaatatcggagcgaaatatggcaaaaccagtgcccaggtcgttctaaatttcttgacgggtgaaggtattgtagcgattcccaaatcggtacgtacgttacgcatgacagagaatttggacattgagagtttcgaactgacagaaacagactggaagatgattcgaaagttggatacgagactgcttaaggttgatttcaatgatccggcgatggtgaaatacctattggagtataataaaaatttcaatccgggcaattgacagtatataaccgtattcatcaaaagcagacgaaaagataaatggaatatcattcttttttgcctgctttattattacatggagataccgtttgtattttatatggtgtacataaattataagtatattgacacctgcatatccgcttcctgaatataaacggaaatgcaggtgacttgacaataagcttagaacaatcgttgttgcttgtacatttggatatcttccaatttcataagttcccacaaatccggtaatattttgcgggactgcatataggcttgtattttctgttggtcttcatcgctgtaataactaattgtccaatgcactttctctttgtctatgtggctgattatttcgtcaatatagggctcgtcaaccggagaaaaagaaaaaccgtaaatataaatatgctcgattttattcattgaagagaagatgctccggttatcttggataatttgctctacatttttgcgaattctatatatttcgttgacagcggcatcacgaactgtttgagttatgtagtcttccccatcgtaccactcggcgagctcttcttccgacaaatccgccggaggctccggttggacgacttctgcagctttggtcagctcttcataagtcttattgtgaccaagtaccagcacttcatcggaagccttaccatgaatgtaaagaatttctgaatcaggaataccgtataagtcctgtaaagtggaagtgtaattaaaattgatgaagtggtcatctcctctggtcaactttatctttttacttccatccgctcttgacaaagagttaatccacgctttgaaagtgtctttaatatcattgaccaaatctcctatttcactttctgcctgatatgaaccggcataataatcccgatccctaaactcgtcactggctaaatccggctgattttccgaagcagtatactgtatgtaggttgcaagttctatttcgcctaaattcacttcaaactgccaccaccattcatcatcatccacataatagaattctctcagtctttcgtagagttccggttcgttctcttcgagccattgacggtacgcactataactactatttattccatgatggcaatcgaatccatttcctataatatacaagtttttcatttaagtatttttatgagttaattctttcatttatgcgaagttagaaaatagttgtgagtcttaaaaaaaattatcttctttttttgatagtctcacttttttatttttttttgcagaaaatcaaccatcataaattatgggcctcaaagattacataaaagaaaaacagaaagtttttaagcagttgaattctgctatagataagacattctcagatgatgctgaagaacgtaaggaaggaagaaaagaattagaaaagttgcgcggtaaagatggagtcgttccctttgccataggttatgcacatcaaatagaatatgactacacaggaaatccggaggacgcacgaaaagctgttgaggaatacaagcgcatagttaatgatgggtatgcttttgtagcaaaaaacattcaggatttggaagcccgattagagaactaattgtatatgaagcggaagtatttcattacaaacagtagattgtagcttgtttgattttgtatccacattaagaagacgtctgcccttatattgtatgactgcgaggacaaacgtcttttttgtggtagttcagtggtcgtggtcaagcataatataccagccgtctttgataggtttgtatagagtcgtacactatctgtttggcaataaatatcattcaaatccgaatgttgttctattggcggtatttgctttttatccagttccgattcatagagaaatacaagaaaccaaaaacactgcagttacagtatttctttaatttcgtatttacgtatctgtctacctctttatttttcatccacaggcttgccctgacttcgtacggtccgcctgagaagattttatcctctcctggaggaattcgttcaaatccttgtgtggcagatagtgtacggccttgtcaaccactttttcacacagccttccgatctcctccaccgcctttctgccggtttcatcattatccagaaagcaacagacctgtccgtaacttttaaggatatccactgccttgggcaggttggccacagaattgagcaccacgcagtccggcacggcttgcccttccttcaaggccaggtacgagagatagtccatgaacccctcgaagaccagtaccggtgactgccgtctatccccggcattatggctgacatgtgtgatgtccttgggggaaaccgcacccttgaagtacgggttgcgtatttcaagcccccctttcctgtttttgaaaccgaccgcgaaataccatttgccacgcatgcggtaatgtacctccacgcattcccttgtggcgatatcggaaggaatgccccttgtcccgagataatccagcaggacggtgttcttaagaggtgagacgcacagcccctcaaaaggcgatgccacagcccgtcctttcgcgggagaggaaaccggcctaaacgccggaaaatcgctttcaatcctctgcaatacggtcgggatatccgtcaccccgtacagcttttgcgccaggtcgatgatactgcccccggttccctccccgaaatcacgtcacaggttcagggaaaggctgaccttgaatgacggggtacgctcccgcctgaaaggcgaaaggtaccatacactgtctccctgtcttctgacaggtgagaatcccgcccgcccgaggaaatcctccagcggaatcttctttacttcctcgatgttcatcgcttgcttgttttacaggttatttaaaaggcggccatgagagcgggtccagcaagacaccgtccttccttaactcaaaatgcaggtggttgccggtcgccactcccgtatgtccgacattcccgatatgctgtccgatacggacatgagtgcccgcctttacatgcagcccgctcatatgcgcgtacagtgtcgagtatccttccgcatgccggacatgcacgaaccaaccgtaactccggctgtagcgtgcttcggcaaccctgccgttccccgcactgtataccggggtgccatagggagcggccaggtccactccctggtggaacagcctccttccctttaccggatgcatcctcataccgaacgaggacgagaccctgaaacgggtgtatcttctgtcaagggggaaaagcacgggataatccgtcaggagaatggggacatgtcgggactttcaaggaaccgttcactttccggcagtaccggtggaatgtccctttaacaattcacccccgtttccgccagccgtaccgtctccccttatacaggaggaggctgacaaaaggtgacaaaacatgactatcaatgacaactttctcataatcagaatattttaagacgaagatagtaattttatctcccgaaacgatttatccactttaaaatttaacagtatggaagaggtaaaaccggctgctacaggcagcgaaaacgccacccaggaacagggttacctgatggcttacgacaagaaggaacagaaggcgaaaggtgtcaagggcatcgcggcaaacggagagctggagacgctcgaggccaatgaaacgaacaagagccagtttatccgcgtggaccggcatggaaatttcttcaccaacttcgggaagaacttcatgtaccagtacaaccatccgacacgctatgcgctgtaccggatggaggagaagaccccggtggaggaagccaagcgtaggatcgagcaggcccagctccccgagaacgagtccttaagacgcgagctctcccgggataaccggatctacaacaaccaccttttcaacgagcgcgagatcaactggcagcaggccgagcgttacgggctcaccccggacgtgctcagacagacgggcgacatggaaaggctgttgcagggcagacagtccggcatagcctatgacatctccatgaacaccgagctgggacgccagaagggggatgccaagctctcgctcttccgcgacgagaacggcctggccaaattcgacctgcactttatccgccaggctcccaaggtgggacaggaataccggggatacaagctggaggaggacgtgctggacgccttgaaccggacgggcaacgccggaaggctggtagacctggtcgtcgacttccgcagcaaggagacgaaaccgtgctacctttcaaaagacccggttaccaacgagatgttcttcctcccggcggaccaggctcgctgccccaagaaaatcaagaattacacgctctcgcagcaggagtacgccgactacacggccggcaaggaggtccccatcgagttcaagtcctcaaacggaaaaatcctgcggacctccatccagatgagcgccgccgaacgcgggaccgagttcctgtgggaaagaagcacgaagaagccggagaacagacaggggcaggaacagaaggacagctcgccggagaaaacgcagaagcctgaaaagaggacctatgcacgcaaatcaaagataaccccgaaaatgtaacggcatggcatccataaaagacaacatggaacaactggaggagctgttcaggcaggacggcggagggtgcctgctcgtcgggtacgaaaccggcatggacaagccccatgctgcgatttcctaccagctttaccctgtcaatccggatcaggacggcatgacctaccagttcctcagcctgctgcatgtcgggatggagaccgcccggatatcggctttcgtccccgatacccgtctggagatctaccgcttcccccgtatgtccgatgtcccttccatatcccgggacatccccgtgaaggaatacatcacaggcaaactgctgccccatatccaaaggtgcggcctggaaccggtggtgagcgtcaacctgcgtgacgtggtgttcatgaggtccgtcctgaaacggtccatggaaccgggcggacggctgcggctgacggccgcagagatcgaccgcctggtagatttccgccggcagcaggacgagaaggcgcggctatacggctatgagcccgcctacaggctgcccctgcatatcgtggaaacatcaaggggcatacttgttttcagtgacgggccggcgggccggaaagggctggaggagttctaccggcacctggcggacaactactggtggatacacagcgaaccgggaccggtcaaacaatatgacatgcattccgttccggcaagcctggccccgctgattgacgcctcctgcagaaaagatcccgataccggaagatacgtgtacgagttcacgaactccccggtacgggcggacctgcccgatgaaagaaaactggagccggtcttctttaccgacatgacgccctccgctgaaggataccgcaacctcacggagttttccggatgtgggatgagcgggtgcaacgcggatatctaccggctgctctcccttacccgccacttcgaccggcagctcattcttgaccccgccttttcctaccggcaccagttccgggagttcgtggaacgcatggacagctttctccggggaaatcccggcggcgatgacatgggaaagatactggatgacatgcacggcaaggcggggcgtatcctgaaaacggatttcgacgtaagggggcaccgtaccctggaacggctcctgaatgaccgcagcgtgccgttcctcatcggggaacacgaggccgatgacactttgagaagggcgctgctcgaagggagatggatttacttccccggactgtcggcaaaaatgcccggactccgttacatccatgccgataagacctgcgaccgggtcatggcctataagaatcccccggggctcaagcctgtataccagatcaaggacggcaagatcgtcccttatgagtcggaggcagtaaaaacggataaagcgcgggcaaagagaaacgggaagaggaacgggaacaatttaaagttatagacatcatggagcagacctacacagcgatagagaccttgggcggcttcctcgcctttaccgacacggcggaaggcaggagaaagctgcggcagttcctgcaacagacggccgacgcctatttcaatccggcattcaattccggagcgttacgtgtctacagggccgaaggggaacttggcaaccgcccctgggtcaacccggggaggatgcggccggacgagtacccctatggcccgaagcctcatggcgaccggatggaactcctctacagaggtgagatgagacccactgcggaggacttccgcagtttctgccataatgcgggctgtgagataagtgcccgcaacgtcaatatcacggacaccctggatgccctggagcgttatgaccgccgggtggaggagttgcaacggatacccgcaaaatccgcccgcgacagggaggaattactgcagaccctcgagaccaggaggcagctgcagaaactgatggactccgcctatgatgtccggggacaccggacggccggaagaatactggacgacccggcggagcgcgtcaccctggaaggagtcccgctctacggacctcacaggagcgtactgaaagagggcctcgggctgtatctgccgcacgaaagcgggaacaacccctcgcatgcctacgcgtgggtggaccaagctacggaccggatcatcttcggcggcaacccgcctgtggaccggaaaaccgtcaggatcagaccggaggtcgagaagaggctgtacagcccgccaggaaaaacacgtaaaaggaccgggacacgtcccaaaatgtaaaataagaaacagatgacaatggaaaaaagcaacaggaccgcacccctaaaagtagtgctccgaaatcacggttacctgctgttctccggcagcaaggccggtgaggaggccctcaggggatatctccagcgtgccgctgacaggtacttcgaaccgcatgctcatgacggggtgctggagatctacgagtactccgggcggcgcagggagctgatgccccatatcaacggcggcggacatggcatgtcctgccgggaagggacgggaaaggcggaatacattccacgggaggcccttcccgcctggtttgtcgacagcctcgagccaaggctctaccacgcgatgaacccgacagccgacgaataccgggggctgttctccaaagtgaagggatatacgggtttcgaactctcctccagagcggagaacgaggacatataccgcctgctatcgatcagggagcgcggctacatgaatatccatgaccggccgttcacctattgcagggagctgcttcccctggccgaacggttcgaagaggtgacgcaggtgaaagccgccgagctgtttgacccgcaggctttcagggcactttcatccgagataaggaaaaaggcggacgatatcctccgccgggactttgacgtaaggggacaccggtcgctggagaaatacctcagtaatcccgacaccgccctgctcgtgggaaacgtgaggctggagaacgagcagttcagggtgctctccgaaggccacgccctgtaccttccggagaatgaccgccccgcctcacggcacctgctctactgcatggcggattttacacggcacaaattgctggtatccggtgaaccgttccctgtcaggacctaccgggtaaaggacggcatccgtcatccggcagggcagtgtgaggagttatcggagaaaaggaaaaggaccggacagaagccttccggcagaaaattataaattaaaacagtaccaccatgtatatcggattcatattgaacggcaggaacaatctggaatactgccggatgctgtcttctgacgcaaacgacctggaccgccggttcggggagttctgcttcaaccaggtcaggaagcagctgaaaggggcctacctgcccgaggaaaggatctactgcatcgaggccgccggtggggataagaaccgggtggaatcccttgtgcgggatataatcgacagaggcgcgtggccctccgacgactaccagaggctgcgggatatcggatttgtccatgagacggccgacccttacaggaggaccgacagccgggactttatcgtcggcgagcttgaacggacgctccacaacgggaaggcgggcagactgctggaagcctaccatgacttccaccaaagccgcgagaaggataccggcaaccgtgtgcttacggccatacagaccggacagggcgtgctgctcttcgacgacacaggccggggactggagcgggcggagagctatctccagtataatgcggacaacttcttcagcccgatacaccgaaataccgacaaactgggcgtctattatttcagcacggacaacgcaaggctggtggaaaaggcgcgggagtgcggcaggatgtttgcccccgacgacaggtgcagtttcatccccgccagggcggaattcctccgggcggacatcctgcggggatgcaagcccgccgtggagtgcgacatgtcccccgacctcgcccgataccgggagatgctgaagatattcaagctcagggaaagtgagacacccttcaacatcggcatactggacaggctgtgcaggacgggaaatcttgacgagatgccggaaaacaggaacttcaggcatttctgcagcttttcctccctgcgctcgcagatgagccattccttcctctcctcactggcggacacgctgctggggaattccatgagacaagccgtcagcgatacggcacggcgcatcctgcagaacgaatacgatgtgcggggatattcgcccaccccggatacgaggcgcaggcgggaaaagaaaccggaaaagacaggtaaaaaaactaacataggaagataatatggcctcgtggttggaaaagctgggactgcaaagaacgcgtccccaaaaagaagagctgaaggacttctgtctggaactgtgtccagacaaccggatagcctccttcatgataacggaccatacgccccggagcggagaccccttcatccggttcgtcaaggaagcggcccgtaaagccgtactcgaggaagcccggggcatccccgacaacctgctgctcttctatgccggcatccggaaagaggagctgccccctgccgccggactgcaggagaaggaacccaggcaggcatggcgtttcatcatcgaaaacggcgggatcacggacggcaactccgtcccgctgagacgggccgcctatttggaggcacacggtgtggaaacggaccgcaggaacctggaagggctggaacactcgccaggctacaaagacttcgtggcatacgagaccgcacgggaacgtatccttcaaggaaggagcgcccggttcctcgtgaccgccgtaaagacggaccagggcgtcagggtgttcaacagggggctgcacggcccgcgccacctgcacgaatacctgcaggaaatagccgacaatttctactcaccctgtggaaagggaccggggacattgtccatattccgcatcgagacctcgtcaaaacggctgatggagatgtcccggcagcccggacggtacttccccgcctcccagcccggactggaagtgttcggaagttaccgtccggtagcctccttcgacctctcgcccacggcggccaacctcgacaggttcgttacggccggctccctggaactttccagacgcaacctggatatcatgacattgcaggacatcgcggaaaagggatacgcccacctggcgctggaggagccgttccgttacaggagggagttcgtccccgtggaaaaagaactcggaaggctatccagggaaaaggagctccatccggactttcccctcggggagaggatggcggagctccgggagacttccaggaagatcgccgccgccctgttggcaagggagggggtccggacagggatgccacggtcggaaacgaggtatgccgacaggatatcacgcatgctggagagtccggcggataccccgggggcggccgataccggcaaaaagagaaaacaaccctcttccagacggaaacatgccgaaggaagacaagtaaaactgtaaactgcaagcatatatggcaaccaacaaaccacttaccccggaagaagccgtcgacatgggccgccgcgctgtcggccgacgggcattgatgcggacactgaaggacatcttctcgtaccgtaacccgctgctgcagttcatggacgcctaccgcttcaacgtcatccgctggagcgcgtccaacctcagggaaccgaccctcggaaaacgtgtcaggctgttcctcggcaccagaaacccgctgcggattctccgcgacaacttccggcagaaccgcgcggacctgacagcggactgggaaagggcggtcatcggccgtatcaacctctcgctggaagagctggggagcatcccgctgcattccaggccccgtgaccttgccaaaaggctggaccgtgtcgggaggatgataaaccggatgaccggctatgagcattgtcccagcctgctcacggagaggctgctgctctccacctacaggtatatattcatggctccccatgacaggcggttcggcgccctctgcccggacgggatctgcgggatgctgcggcagaacggcgtgccgccggagagcctgtattaccagaactacgaaagcctgctgcaaggaagggagacggtcatctacgagttcacctccaacgggaaagggttacagtatctgcgtcccctggaacacgtgaggctggatgccgacccgggcgggtacgacatgcttcccgcccgccgggccgacagcccgaaggccccttcgattccctatggggcggaagaggccgtgccgctctccgaaaaggcgggaaaaaacggaagggataccgcaagggagaagagaacggcccggaacacaaaagtcaaaaagacaaaggccaaaaacaaaggcatgagcatgtaaccaattattcacctgataaaaacaaaaattatgagaatcgtacttacagacaagccagccatggcaaggagcatcgcctccgtactgggcgccagtgaaaaggcggaaggatatctttacggcaacgggtatgccgtcacatgaacttacggccacctgctggcacaggcaccaccgtccgcttacggacccgcccgtgtggaacggcaggcgcttcccctcattccggtcccgttccgtctcgttgtcagacaagtcaggacggaggaggggtatgtcaccgacccggtagccacccggcaactggaagtgctccgcgggttgcttgaaaacgccgacgggcttgtcatagccacggacgcggggcgtggaggagaactggtcagccgggatctcctggactatctcggttaccgtaaaccggccctgcgcctgtggatatcctccctgacggaaaaggccatcctggacggtttcaaaaatctgagagaggacagcgacttcgacaacctcgcccaggcggcgagggcacgcagggaagcggactggatactgggcgtgaacgcgagcatcgccctggggatagccgccggcatgggcaaccactcgctcggacgggtgcagacacccacgctggcattggtctgccgccgttatcttgagaacagggattttgtgcccgtgagctgttaccatctgcagaccgatgtctgcaaggacgggcagaaagtgcttttcacgtgtcctctccggtatgaaaggaaagaggatgcggaaaaagcccgggtcggactggagggcgaaagccgttgtacggtccttgccatggaaaagaaagagatcatggaggagccacctctgccacatgacctgaccggcctacagcgggaagctaatacacgcctgggcatgacagccggacagacactcgctgtcgtccaaagactttacgaaagagggtgcgtctcatatccgagaaccggatgccgccacattccggaagacatcttcaagcaggcacccacgctcgtcgccacccttaaagggcatccccgcttcggaaggcacgcggaaaggctgctcgggaaaggactgaaccctcatgcggtggacggggacagcgtggcgggacaccatgcccttctcatcacgggagagatgcccgaaggactctccccggacgagcagaacatctactccctgattgccgggaggatgctggaagcattttccgaaggatgcgtcagggaagtcatacgtgtcagggccgattacggaggaatggaattcgaagccgaaacctcatgggtgaagtatccgggatggcgggacatttacaacggaccggacatggcggaagaaggcaaatccctgccgcagttccatcggggagagacgctggcggtattggaaacagagatactggaagacagtacaaagccgctgccaccatttacggaagccggactgctggctgccatggaaaacgccggcggcacggcggacggtgaaaacaaaaagaaaacaacggagaggtgcgggctcgggacaccgggcacccgtgcaggaatcatagacctgctggtggcacgacggtacgtagagcgtatcggaaaccgtctcatcccgacaaagaaggggctggagatatacggcatcgtaggagacaagctgatcgccgacgcggctatgacggccgcctgggaagaggcgctgcgtgaaatcgaggaaggaaggctcagtgccggaaagttcatgaagggtgtccatgagtatgcacggaagatcgtgtcggaactgctcgccctgcaggtcaggaacccgggcgtgacaaggtgcgcctgcccgaaatgtgggacaggcaaagtgacactctacgacagggtggccaaatgcggagatcccgactgcgcgttccatcttccgcgcatgttcaacggacgggagatgacggacgaagagatgacacggctgatggtaggggaagctaccccctttctgaaattcaccaccaaggcgggaaaaccctatgaggcgtcgctcagaatggacgagaattacaaggtggagcttacattcaaggacagcatgcgggagctgtaacaggaccgatactgtaagggaaatgtcccggcctgctcttttcggagactggccgggattttccgttaatcggggtgtatggaaagtccgtatatcattacaaccgtctcgggcgttaccacctgatgtgtaccgacggtagctcccaccaagtgaacgtcgggtttcctttcccgaagtgacggagcggaaaatgccagcggcccgcttacggaaaagttcattgccgatagttcaaggagctgttgtccgtaaggaaatgaacaggctgggccttggagtacggatatgaggtagctcctgccgcaatctccattcaatatcctgtatgtaaataatccagacggcagacacccgtatcgaaatgtctgtttccaatcaatttccagacggaaggcgcaagagcgtctccgaacagcctgatacctccctgcagtctcgggataagatagatcaccatctcgtccaccatccagaacctgagcaggctgtcaacaagcgggagtgtgtcagggcaggcctcgacaagggcaatcccatccccttcctctttccatcgggagagtgagacgaaagataccggtccctcaaggtggcgtaccgccttcttcctgatccgggtgataccgtatttctccgcagaatcctgcaacgcggagagggactgccgctccaacaggcagccgtcaagggagagaaaggccataagctgaatctttgccataagctgaatgtttaatgataccgtctacttcgcaggcaaaatccataaaaaaaacgtggacttgcacagtgtcaagacgaggctctggtaagcccagaataagaactgtgcaagccacgctatgacaatgcatagcatagccttacacagaaatcccttattctttgaatttaccagattccgtcttgaggatgttctgcgaacgttatgtctatatatctcaagaaagaaggaaaaatactccttcttttcccaaactcatattttcgttccaaatataggaattattctaaaaatcacgaaatatcgtccggataatcttcccgtcaaggattggaaagggtatagtgtttcacgacgggcttccagaaaagcatatgactattagtgactatacatgacaatgcatgacacgggaaagtaacatccctctttctttactatcttgcacccgaaatcactaaaaaaatgaatatggaactgacaattatcgaaacaagcgcttatctggaattaaagcggcagctcagcacgttgtccgtgcaagtggaggatctcgcccggaaaatggctccacctgttccggacaaatgaatggacgcgcaggaggtatgcctggcattgggaatctcgaagaggtgtctccaggcttaccgtgacaggggactggttccctgctcacatatcggcggaaaatatttttaccgtgagacggacatacagcaaatcctggaagaaggactaatcaaaaacagaaaataacagatggcggaaatcattaccaaggattcggaggagttcaaggaactcaccggatggatcaagagatgtggaagggcactggaaaacgcgacggctcgaatccgtccgggcatagccgacgagcattatctaacgggagaggaagtctgcgagaaactgcatgtatccagaaggacgcttcaggcactcagggacgagaaggcaatcccgtacacttccattaccgccgcaggaggcaagctgctatacccggaaagcggactgtacaaggtactgaaaaagaactacaaggacttcaggcgatatgccagataaacaaacggcacgtattctgaacaaaaaaactccttcggccggattcgaggctgaaggagtttttatataagttccgggacttagttggccagccggtatgtgtcaccgatcttcatgcacagcctgtccgtatcttccccgactttcggattgatcagctcagcataaatctgggtggaaagaatggacttgtgccccaataccttctgcaaggtttccaacggcatcccctttaaaatggccagaacggcaaaagtgtggcgtccgatgtgcggggttatcccggtcgagcagccgcatattctggtcaggaccctcagactggatatcatggcctggtattcgcctacgggaaacaccttgtcaggcgaacttttcttttcattgtcacccctgtacttctcgaccagttcgatggcgataggaagcagcttcaccacataggccacgccggtttttatacggtttcccatcagccatgtaccgccctcggaatccgtatggatattcttgtacgtaatctctttcagatccgcatacgccaaacctgtaaaacacatgaacaggaacatgtcacggatggcccgctggcgcttgtacttcaacttgacatggatgatgctttgcaagtcctcctcggtgaggaaagagcgccgcttgtattcgggcaggcagtcaaaaccgatgaacggatgaagccttatccagcctctttcctgggcggtatacatcagccatttcagggtgttgacccggcagaaagccgtcgaattcgccagggcgcatgtcccgagcatccagttataatagtcctcgatgaacttcttgtcaaggtcggcgatggctatatcctcgatgcgcctcttctctttgaggaaaagcaacagattcttgtagtcggccaccagcccgcgataggtgcttgccgccttttccttgcctatcttttccttgtaggagacaagttgctccctgaacaatcccataagggtgtgataatcgtctccgaagccaagatagcggttgtagacacttttagctgtcaccaggctgtcatggtcacagacatactggtaatgccttgtgatttgggccttgatattgtcaagctcctggttcagccgtctggcctcgtcggatttccccttcgccctcttggccttggcatcccataatgccagtgaaacttcccgcttgcaactgaagcaggcggtggtcttgttgatggttatacgtcccataatgggcaccttaccgtctttcaacgattggttcttggtgtaaaacaacacggaaaatgtacttctcataaactcacttcttttagttacaaaattaataaatatcgagcttttcgaagttatgaaaagtaacgcaatgcattgaaaaataatcgtttatatcccttgggatatccgtatttgcaaggtaacggataagtaacggaagtcgcagcaaaacatgccctataatgctcgctttctctaccaacaaccaaaaacagaaatcaataactatttgattgttaattggttttcgctacctttgcaaactgtggaaaaacacttagtttcaaccgaggaaactaaagtttcagagccttgaaaccaatcgtttcatgccttgaagcactttgttcctcaccgggaaacagaaattgcccctagttactgctttcgtttacagtagattttatccaaattagcaggtgataggtgatagatgaggtgataggttgcaaacaacctatcaccgttctgaaagcatgatgaataaagggattcgcaaagtaggtgataggttgaaagaggattttcgtttttttatatggaagagagtagtcggataatacagaacttcctgtatttattcctgtatttctgctgcatttcaaaaaaaagatatatctttgtcatacgctttctgctcatcagcgtgatgaaattggcagaaggcgtttttatttcctaatggagtaaaagtgtattatctctcgttctcaaaaatagcaacttttagtagagagagatgatacagcagatattccacgtgaacggctatatatcaacatatccgtaaaagatgtgttatatataaatgattgacgtggatgtctgttgttatcattatcttctacgacggtgttgctagccttgagagcggataatggtgcagcagcattcacgtcttttttgtatccggtcggtttcataaaccttcaacatactctaaccagttcccgccagctggactgcaaaaagagtgaatgctcgttgtgctaataaacatgaataaagtattattcattcccttattgtatgacacataaaagaacaaacgctatggcacaatggattagcatagaagaagcagctgtgaaatatggatttgaggcagaatacctctgggttctgatagaaatgagagaaatcatagtagactaccaaagacccgatgttgactttatagacgacagaagcattcaggattttgtagaacggaacagacagggagctacacagatgtatatcgataaactggaacgattatgcatagataagtcccggctttgttcaatatacacgtcacttttaggcaagcaggacaaggaaatcacaatatataaaggagcaaaagtcttatatgacgtattgcaagccaagtggctgagacaatgcgcccgcatgcggaagttagaaaaagaacttgcattggcgcaaaccgcctgtcgtgcctgttggttcaaaagattctgtatgagaatccggaaatgaaattaaactatcagagaaggcgcgggaataggagtggatgaacaatagcgactttgagcgaacaaaaaaccgataaattgtgtttatttattctaattatatatctttgtcccgaattataaacacgtaaatttatgaaaaagatttttggtgctttattgattgctgtatgtattggtatggcaatgcctgctcaggctcaaatacattttggtgtaaagggaggtttgaacttgtcaaaagcgagcttctctaatgtgaaagaaaactttaagaaggataattttaccggcttctttattggcccaatggctgagtttaatattccaatcgtagggttgggggtagatgctgcgttgctttttgcccaaagaggtatcaaggtttctgatgccgacgcggatgttactgtgaagcagaacggtattgatatcccggttaacttgaagtataacatcggcttgggtagcctggccggtatttatctggctgccggtcctgatttttatttcgactttgaaaagaaaaccggaatcgacaagaagaaggcggaagtaggtatcaatgtaggtgccggcctgaagttgctgaaccatttgcaggtgggagctaattataatatcccattgggcgacactgctgatattgacggcggcggttcctataaaaccaagacttggcaggtatctgttgcttatattttttagcggataatttactttaacatagtagaacaagaggctttcgactgtcggaagcctctttttttatatctttgtgcctgcaatgaaaaagtatgtagatgtcatattaccgcttccacttccaaagagctttacttactctttgccggacgagtgtgcggaagaagtgaagatcggttgtcgcgtggtagttcctttcggacggaagaagttctatacggctatcgttcttaatgttcattattgtgctccgacggagtatgaggtgaaggacatatctgcattgctggatgcttctcctatattattgcctgttcaattcaagttttgggagtggatagccgattattatctctgtacgcaaggggatgtttataaggcggcgctgccttcgggattgaaactcgaaagcgaaacgattgtagagtataatcccgattttgaagcggatgcaccattgccggaacgtgaacagcgcattctggatttgcttgccgtggatgcacagcagtgtgtcactaagctggagaaggagagcgggataaaaaatattctgactgtcatcaagtcgctgctcgataaagaagcgatttttgtaaaggaggagttgaggcgtacttataaacccaagacggaggcgcgggtgcggcttgcgggttcggcggatgaaaaacggctgcatatactgtttgatatcctgtcgcgtgccccgaagcagttggcattgttgatgaaatatgtggaatgttcggggattctgggaaatgaagtcccgaaagaagtctccaagaaagaactgttgcaacgcgccaatgtgtcgccttccattctgaacggtctggtagagaaaaagatatttgagatttatcatcatgagatcggccggttgaaccagcaggtgaaggaggtcgtcgaactgaatacgttgaatgagtttcagcaacgggcacacgatgaaatcgtacagtccttccgggaaaagaatgtctgcctgcttcatggggtgacgtccagtggtaagacggaagtatatattcatctgatagaagaaactattcgtcagggaaagcaagtattgtatttgttgccagagattgccctgactacccagattacagaacgtctgcaacgggttttcggctctcggctgggcatttatcactctaagtttcccgacgccgaacgggtggagatatggcggaaacagttgggagaaaatggctatgatattattttgggagtccgttcttccgttttcctccctttccggaacctgggactggtgattgtggacgaggaacacgagaatacttataagcagcaagaccctgctccccgttatcatgcacgtagcgcagctattgtactggctgccatgtatggagctaaaacactgttgggaacggctactccttctatcgagacgtggcagaacgcgacggacggaaaatacggctttgtccaactgaaagaacgctataaagagattcagttgccggagattatcccggtagatatcaaggaactgcaccgtaagaaacgaatggtcggacagttctcgcctttgctggtacaatatatgaaagaagccctggaacagaaggaacaggtgattcttttccagaaccgtcgcggcttcgctcccatgatagaatgccgtacttgcggctgggtgccgaagtgcaaaaactgtgatgtgagcctgacttaccacaaaggaatcaatcaactgacctgccactattgcggctatacctatcaacttccgaaggcctgtcccgcttgcgaaggtacggaactggtgaaccgcggctttggtacggaaaagattgaggacgacatcaaaatccttttccccgaagcagccgtggcgcgtatggatttggataccacccgcacccgctctgcttacgaaaagattattgcagactttgaacagggaaagaccgatattctgatcggtacgcaaatggtgtcgaagggtttggacttcgaccatgtaagtatcgtcggaatactgaatgccgatacgatgttgaattatcccgatttccgttcttacgaacgtgccttccagctaatggcacaagtagcgggacgcgccgggcgtaagaataaacgcggacgtgtgatactccagaccaagagtatcgaccaccctattattcatcaggtgattgccaatgactatgaagatatggtaggcgggcaactggcggaacgtcagatgttccactatcctccttattatcgcctggtatatgtttatctgaaaaatcataatgagtcgttgctggatcaaatggcggtggtaatggccggcaagttgagggcagtattcggcaaccgggtgctgggaccggataaacctcctgttgcccgtatccagacactgttcatcaaaaagatcgttgtgaagatagaacagaatgccccaatggggcgtgcccgggaactgcttttgcgcattcaacgggagatgatagaggatgagcgttataagtccctgatagtctactatgatgtagatcctatgtgataaaagaaattattcccccttattaataaaccttgtattaatttaattaactaaccatgaaacgatttacaattttttctctgacttgtttccttagcatgggttctgtgtttgcccagcaaggagtaacccagtgcggcgttccgacaggacaaccgaagttccctttacaggcttatcaggaattgcccgaccctgcagcaccttccgaaaaagaatgggcggcagtcacggcaccgcaagtgtcgtggggaacgattgatgtccgctacgcgaaacatcagcttccggctttgaagaaaaccacgaacacctctctgaaaggctggcgcggcgaacgtgtgaatgcccaagcggtcgtgtggacaggcacggagctgaaggacttgaatttcagctttaccgattttaaggataagaaggggaactctctttcgggagatgcgttgacagccggctttgtccgctacgtcatgacggacgaactgaacaaagacggaagaggtgcgtgcggctatcggaagtcggtggactttgactctctattggtagccgatccgattgactcggaactgaaaacgatggctttgcctgctcgtactgttcagcctatctgggtacaatgctggattccccagtctgcggttcccggaacttataaaggacagttattggttaacgacggctcgaatctgttacagcgcctcaatcttgagattacggtttcttcccgcgtacttccccaaccctcggaatgggcttttcatctggatttgtggcaaagcccgtatgccgtagcccgttattatcaggtgcctttatggagccaggaacatctggacgctatgcgccctctgatgaaaatgctggcaaatgccgggcagaagattattacggctactttgactcataaaccctggaacgggcagacggaagattatttcgacacaatggtgacttggataaaacgtgcagacggtacgtggacgtttgactataccatttttgaccgttgggtggaatttatgatgagtgtcggcattgacaagcagataaactgttattcaatggttccctggaaactgtctttccagtattacgaccaggctacgaactcgttgaaatttgtgaagaccgcaccgggcgaacaggcttatgaagaaatgtgggtggcaatgcttgcttcttttgcaaaacacctcaaagaaaaaggctggtttgatatttgtacgattgctatggatgagcgcccaatggacgtaatgcagaagactctgaaagtgattcgtaaggctgatccggattttaaagtttcactggcaggaaattatcatgcggaaattgagccggatttgtatgattattgcattgtgatcggtcagaactatcccgaagatgtacgtctccgccgtaaagccgagaataagcgcactacctattatacttgctgcacggaagcacaccccaatacgtttactttctccgacccggccgaagctgcctggatgagtttctattcttcaaagaagcatctggacggttatctgcgttgggcgtacaacagttggccgttggagccgttgctcgattcccgtttccgtacctgggcagccggagatacttatctggtataccccggagcacgtagctgtatccgtttcgaacgtttgatcgaaggagtacaggcacatgagaaaataaatattcttcgtcaggaatttgagaagaacggaaataaagccggactgaagaagattgagaaaatgctggctccgttcaacttgggggatatgccggagatcccggcagctgtcaccgtgaaccgggcgaatcagattttgaactcattctaaccggcgtaacaccggagcaaggtttccttgtggcatattgtcaagtattaaaagtttattatgaagaaaatattatttgtttgcttgggaaatatctgccgtagttctacggcagagggtgtaatgcttcatttaatagaggaggcgggactggagaaagagtttgtgatagactccgccggaatcctgtcttaccatcagggagagttgccggacagccggatgcgtgcccacgctgcccgtcgggggtatcaactggtgcatcgttcacgcccggtacggacagaggacttttataattttgatctgattatcggtatggatgaccgtaatattgaggacctgaaagataaagctccctctcccgaagaatggaagaagattcaccgcatgacggaatattgcaaccgtatccccgcagatcatgtccccgacccctattatggtggggccgaaggtttcgagtatgtgctggatattttggaagatgcctgttttggcctgcttatttctttaactcaggataactgatccgggtatgataagcaatctttagtttttctttgaatacagtttttattgtggcaatatctttgaaagtaatagggcattccttgaagtagccctctgtaacctgggagtcaataatcttgtcgaccaggttacttatactttcttccgtatattcaggcagactgcgtgaagctgcttctacggcatccgccatcatcaggatggcctgttctttagtaaacgggttcggaccgggataagtgaataattcttcgttcggctcctcgtccggatgttcgtttttccacgagatatagaaatattttgttttcccccgtccatgatgcgtactgataaagtctttgacggctttaggcagattgtgtttgtcggctagttttaatccgtccgtgacatgactgatcacgacctgtgcactctgttcgtagctcaggttcttgtgcggattgacccctcccgactggttctcggtgaagaaagccggattctccatttttccgatatcgtgatacaaagctcccgtacgtacgagctggcttttcgcaccgacgcggatagctgcttctgccgcaagattggctacctgcatggagtgctggaaagttcccggtaccgtctcggacatctggcgcagtaagtcattattgatattcgatagttccaccaaagtgacattggaggtaaatccgaatgttttttccaacaggaacaacagcggataagcgaataatagcagaactccatttattataaaataggtgtacatccgcaaattcagtttcgagaagtcattggaaagcccgttctccgtcattaactcgaaggcaaagtaaatggcggcataagtcaatatgactaatagcgccgtccggaaaagctgggatctttgggataattcccttaaactgaatatcgcaaccagtcccgccgccaactgggtcaggataaattcatgcgggaagcgtagggatatggagcatattaatatcgtgatgacgtgtgtcaggaaagcggtccttgaatcgaggaacacacgaataatgatcggcaacatcgcataggggatgatatacacattgaatatattgtgtgtgaccatgaaagccgtgactatactgtaaaatacaatcaaagtgaacagcagcgacaaactgcccttccgttgataatagtctttccggaataaatcaagataaagcatgaaacacaacatcagcatacccacaaacagaatctgccctccgagaatcaggcggctttgccccattgactcattccgcttaatggattctttccgcagtgattctagaatattataagtttccgggctgatgatctctccccggtcgataatcttttgtccgctgactaccagcccgttcgcccaggaatagttgttcagcatttcttctttggcagtctgggtgcgttgttcgtcaaaagtgaggttgggagtgatgtattcgttcaacgaacattgtcttagaatatcccggttgaaatgggtagagtcagccgaaagcaggtattcgtaagccttcttcaccgtgtaaatctcctcggtgggatgcgggttggctagcttgtcgtctataaccatgatagacgaagtgctgtctttttgcagttgctgtatgtcttctgtcgatacaatccctgcctgatagatttctttgagcgtgcgttcgatataccgcaggtaatctatggatggaaggatccctttcaggttcgtatgatagttctccttcaatttgctgatggcgtccttttctatcttcttgtcgagctcgtagtaaggttggaaaagaactaacagactgtcttgttcgcgcttcaccaccgcctcgtctttatagataggaaaatcgaaagtagctatcaactgcccgtacttccagggtttgtttatatcaaactggtagttgaacttcccgtcgcgcggtaagaaataaacaatcagtgccacagtagccacaaatagcagtgatttatatagcaaatctctccatgagaaactctttttcttcttcaaatgttccatacgcattgaaatttttgcgaaaagtacaaaaaaaaacaatagtgtggaaaaaaaggtttaattttgccacgatttacctatactaacccaaattatggcagaaagaaaagtaagagttcgttttgctccgagtcctacgggagcactgcacatcggtggtgtgcgtacagctttgtataattatctatttgcgcgtcaacacgacggagacctgatatttcgtatagaagatactgactctcaccggtttgttccgggagcggaagagtatatactcgaatctttcaagtggttgggtatccactttgacgaaggtgtgagcttcggtggggaacatggcccgtaccgtcagtcggaacgccgcgaaatctataagaaatatgtagaggttttgctggagaatggaaaagcatacatcgcctttgataccccggaggaactggacgccaagcgtgcggaaattgctaacttccaatatgacgcatctacccgagggatgatgcgtaattcactgactatgccgaaggaagaagtggatgcactgattgcggaaggcaagcaatatgtagtccgtttcaagattgaaccgaacgaagatgttcgtgtgaacgacttgatccgtggtgaagtgattatcaactcatctattctggatgataaggttctttataaatcggccgatgaactgcctacctaccaccttgctaacatcgtggacgatcatttaatggaggtttcccatgtgatccgtggggaagaatggttgccttccgctccgctgcacgtactgttgtaccgtgctttcggctgggaagataccatgccggaatttgctcatctgcctctgctcttgaagccggaaggcaacggcaaactgagcaagcgtgacggtgaccgtctgggattccccgtattcccgttggaatggcatgatccgaaatcgggagaggtttcttccggttatcgtgaatccggttatttgcctgaagctgtcatcaatttccttgctttgcttggctggaatccgggtaacgatcaggaagtgatgtcaatggacgaacttataaagttattcgacttgcaccgttgcagtaagtcgggtgctaaatttgattataagaaaggtatttggttcaaccaccagtatatccagcagaaaccgaatgaagagattgccgaactgtttgtgcctgtattgaaagaacacggtgtggaggctcctttcgagaaggttgttactgtggtcgggatgatgaaagaccgcgtaagtttcgtaaaggaactgtgggagacatgcagcttcttctttgtggctcctaccgaatatgatgaaaagacagtaaagaaacgttggaaagaagattcggctaagtgtatgaccgaattggcggaagtaattgccggcattgaagattttagtattgaagggcaggaaaaggtcgtaatggactggattgcggaaaaaggttatcatacaggtaatatcatgaatgctttccgtctgactctggtaggcgaaggcaaaggcccgcacatgttcgacatttcctgggtattgggtaaggaagagactgtggctcgtatgaaacgggcggtagaggttttgaagtaatcgacatacatagtactatgctttacaacctggcaatagtcatttatgactttttcgtccatttggctgctccgtttagccgcaagccccggaagatgatgaaagggcattgggtggtatatgaacttctacgccaacaggtggagaaaggggagcggtatatctggttccatgccgcttcgcttggtgagttcgagcagggacgtcccttgatagaaatgattcgggaaaaatatccgaattataagatattgcttacttttttctctccgtccggttatgaagtgcgcaagcactaccggggagcggatattgtctgctatctgccgtttgacaaaccgcggaatgtgaagaagttcctggatatctcaaacccttgcatggcattctttatcaagtacgagttttggaaaaattatctggacgaactgcataaacgccgtatcccggtgtatagtgtgtcttctattttccgccgcgatcagatcttctttaaatggtatggagggacatatcggaatgtgttgaaggatttcgaccacctgtttgtgcagaatgagacttccaaacgttatttgtcaaagataggtattaaccgtgtgacggtagtgggtgatacccgttttgaccgggtattgcagattcgcgaggaagccaaagatcttccgttagtgaaactgttcaaaggagacaatacctttacttttgtggcgggaagctcttggggaccggatgaagatttattccttgagtatttcaacaatcacccggaaatgaagctgattatagctccccatgtaattgatgaaaatcacctggtagagattatcagcaaactgaaacgtccttacgtgcgttatacccgtgccgacgaaaagaatgtattgaaagctgactgtctcattattgattgtttcggattgctttcttctatttatcgttatggagaaatagcttatatcgggggtggtttcggggttggtattcacaacactttggaggcagccgtgtatggtattcctgtgattttcggacctaaataccagaaatttatggaagctgttcaattgctggaagcaaaaggagcctattctatcaaagattatgatgaactgaaaactttgctggatcgtttccggactgatgaggtattcttgcgtgaaaccggtacaaatgcggggtattatgtgacaagcaacgccggagctacggagaagattatgcacatgattaatttctaattataaaagtcccctaattttagttctctgtaatgggtcaatctaaaataaggggacttctctcttcttaaaggagatttcatattccgaaatcctgccctgaaaaacaattctcttttattagtatttgtacggacttatatcttattgatttcttgttccagtaaatcttttaattctttggcggtaatgtgagtaaatcgtttcactatattcccttgcttatctattagcagatacatcggtaaccctgtcatttgaaaatgtgtccaaagatattcccattgctctttgtccagccagtaatgttcgcctgcgatatcttctatgagtatttcccatgtcttctttatcgaactggggccggtgaggtaaatgaaagctactttgtcttcacttatatctttctttagcggctcatattctttgataatctgccggcaaccgccacaccaggtagcccagaaatcgataaactgtactttgcctttatgacgtgcaatgagtgcatccagcagttcttcttctgccacttgcggcgcttcgcagatggtatatttctttgttgttgccttcttccggggttgcatctgacggttcatgtcttgaatgattcctatgaatataggatttgtaatttccgaagccatgatttcctgccgggaggtcaacggttgtaggttgtaaaggctggagcgcatatagattgcgcgtatgtagtcaaccggcaaacaggtgctgtcttgcaggatatgccccagacgttttttggcttcggaaaatattttccagttacagtcgtctctctctttagtatatttgcggatgagtgtcatcaaatcgttttgctgccggaagattactcctgctttaaaagctgcttcatattgatgaatgagtgtctgctcctcttttgtgagcggtgcgttttccaatagatatttttccatagagagtgggtcatagtgtgtatcatataagaagtttgtgactacattacggtaattataacaataaagtgccaaagggtgattgacaggaaaatctttcaggtagttgtgaaaatcatcagataaatgtatatcgaggaaagctgcaaaagcttgttctcgcgtaatgttttctttcttctgataagctgtttgcagacaatagtgggtagcttgcaggttttccagacaatcaaatgcgcatgaaagattggctagtgtacgagtgtcttcgctgaattgtgactgtgtgttgttgtgcgctatgtactgtttgtattggttgatgcagcgttccttgaactcgttggcactgatgcctgcaatagaatccaataagtcgccatctctataaacaggaggtatctttgttatcagttccggctgacaccattcattgttaatggtagcatactgaccactatatacaaattgttttcctggcagattgcttaaattgatagttacattggtctctttttcgggacttaacagaatgactaaatctgcatttcctattatcatccgtacttgagcactatggtagagaggaatattaatcgtgaaacttccatctgcttcaacagtcggataaagtgtctcggctgttcccattacgatattgggagcaccgatcttgaatatcagattgtcgtctggattgtaattggcgattgtcccactcaggatggcttgtccttttttatactcgggggtcggtaattgtgcctgtgctagattgaataacaaagacaggcaaaggaaggtaaatagtctgctcatagtagttcttttattgtatggattatttctttatcggtattctctttactataacttctgattccttcttgatctacaatgaaaaagtaaggtgtggcaccgcttgtctgatattgtttgattacttcattggctgcgtttagaatagtatcatttaacttcttccggtttgcgtaatttcgaatagaagatacttggcggctccaagattctattgcgataagctcaaactctttgctactgaataatgtggtggaatcatcaggttgccggctttcgtcagtgacgtaatatgtcgcagattcaatcttttctaacttggtaagtactttctttaaaaacgttctttccatgatttgggtattggcagctattgttgctgtcggtaagagaattgtaagtagtagtcttattttcataataggtgaatgtttgttgattcactgcctcgatttaatcttttacaaatctacggatctttcgtaatatttcaattatcagagggttaaataagatgaatatggactttggaagtcaatgatgattgatacgggtaatacaagaaaaactccttcttactcttatgttttaagtgtaagaaggagtgaagctttgtttccgattttactaaaaaatcattctttataccattgcgaatacatcagataattgtgagcaatcttctggtttaattctttggcttgttccgggtctaccttctttataaatttggcaggtactccaccccaaatacttccaggttcgattactgtattacttaggactaaagaaccggcagctacaattgctccttcaccgactatagcatggtctagtatggtcgatcccattccgactaaagcataatctttgatagtcgctccgtgtatggttacgttatgtcccacggaaacatggtcgccgatttcgataactgatttttgatataatgtatgcaaaacacttccatcctggatgttaactccattgcctatacgtatagaattgacgtcaccgcgcaatacggtgctaaaccatatactgcaatcatttcctatttttacatctcctataatagttgcgttgtctgcgaggaagcagttttctccgatttcgggagtaaagccgcgtacagattttattaaagccataaagtatttgttcctaataaaatttttaatttaatgctgccctatgttgtatgacatccgggtgttaagcaaggttggcttaaatagaagcagtcgcttcctgtaaccaaactttttcttcttcgttaagattcggtgacagcttttcgtagacaatctgatgataattgtttaaccattcaatttcttcatttgtcagcatttccttgactattccctttttacaaataggacataaagtaatcgtctcaaacttgagataatctccgaacataccttctttgtctttgcagacaagcgtcaggttctcggtgcggatgccatgactgccggctttataaactcccggttcgttggaagtaaccatgccgggttgtaatacgacagggttctcgttcatgcggatactttgcggtccttcatgcacgctgaggaaatgcccgacaccatggcctgtaccatgaaggaagttcattccatatttccagatcggcatacgggcgagaacatcaagttgggcgccccgggttccgactgggaacttagccatagccaatgcaatatgcccctttaatatcaaagtataatccgttttttcttcttcagttagttcacctaatgcgatcgtgcgggtaatgtcggtagtcccgtccagatattgggctcccgaatctaaaagaagaaaacctttgggttgaagaggaacgtcactttccggagttgcggagtaatgcacaatagctccgtgttccttatatccggcaatagtgtcgaaactctctcccatataaaggggctgggctgctctgaattcatgtaatttcctgtctacgcttagttctgtctctttgccggaaggcactgcttcttccaaccatttgaggaatttgacgagcgcaacgccatcccgctgcatagctgcatgaatacctgcaatttcttgttcgtttcgaatagcctttaatagagctacaggagattcaccacgtataatgttgcatttcggattaattgcagaatatatggcaaagtttgttttcttgggatcaataaggatatttctgcctgtaaaagtattcaagtaagtttctacttcatcgtagtttttcaacttgacatgctgttcttttaaatactcgttcacttcttttgtaaccttttccggtgagatgaagtaaatcacgtcatcttgcgtgattaacagatagctgactactaccggattacaatgcacgtcgttccctctcaaattgagagtccatgctatttcgtccagggcagataagaataaggcatacgctcctttctttgttaattcggcacgaatagcggcaactttttcttcacaacttttaccggcatattcaatatcatagacgaaggccggagaatcaggtatagaaggccggtctttccaaatccttttcagcggatcaccgaataagtcaacctgcaaactgtatgctgcaagttcttctttcatttgctcaacttgttgtacggagaacatcttgccatcgatacttaccgattcaccgggctttaacttctggctgagatattttgtaatactgggagtttccggtagcatttccttatataaagtaataccgctaccctccaattctttggcggcttgtagaaaataacgggaatcggtccatagtccggcttcgttcattaagacgacaacggttcctgccgaacccgtgaaaccggaaatccattcacgtgacatccagtgcggagctacgtactcgctcaaatgcggatcggtgctggggatgataaacgctttaatgtaattgggggggaatgtcattcgtaatgcatgcattcgttcttttatactctgtctcataccattttatattattaatagacatataacagattcaaaggtagtaactttttacggttaatgagttgtttatgaatagtttttgagaaatatttgccgaaagttttgtgaataaagaaagtatgtgtaattttgcgacgcaatttgactgcggaattttttaaccaataacatattaatagtaacaaaatgattgtagtacctgtaaaagaaggcgaaaacattgaaaaatcgctgaagaagtttaagagaaaattcgaaaaaactggcatcgttaaagaattaagaagaagacagcagtttgataaaccgtctgtaactaaaagacttaagaaagaacgtgcagtttacgtacaacaacttcagcaagtagaagattaataattcgtaatttcctttgaattattgaattcttttcatacattcgttgcacgattttagatgtagcgatattatgttaataaaatcttttcttgattatctccggtatgagcggaattactctgaaaaaaccgttctggcgtatagtgaggatataaagcaactacaggagtttgctcaggaagagtatggaagatttaatccgttggaggtggaagctgaactgattcgtgaatggattgtttcattaatggataggggatatacttcgacttctgtaaatcgtaaactgagttcgctccggtcgttctataaatatcttttaaggcagggggaggtggttaaggacccgctatgtaaaataacaggacctaaaaataaaaagccgctacctgttttcttgaaagaaagcgaaatgaacaagctgctggatgaaacggattttggtgaagggtttaaaggttatcgggatcgattgattattgaagtattttatgctacgggcataaggctttcggaattgataggattggatgacaaggatgtggatttttctgcttctcttttgaaagtaaccgggaaaaggaacaagcaacggctgataccgttcggtgatgaactgcgtgagttgatgcttggatatattaacataagaaacgaaatgattccggaaaggtcggaagctttttttgttagagagaatggcgaacgactttataagaatctagtctataatttagtgaaacggaacctgtcaaaggtggttacgctgaaaaaaaggagtcctcacgtgttgaggcatacttttgctaccacgatgctgaataatgatgcggagttgggtgcagtaaaagaacttttaggtcacgagagtattgcaactaccgagatctatacgcatgccacatttgaagaacttaaaaaagtgtataaacaagctcatccaagagcttaaaaacaaggaggtaagtatggatgtaagaattcaatcaattcactttgatgcgtcagagcaattgcaggcatttattcaaaagaaagtgtctaagttggaaaagtattacgaagatataaagaaagtagaggtgtcattaaaggtagttaagccggaagttgctgcaaataaagaagcaggcataaaaatacttattcctaacggggagttttatgcaagtaaagtgtgtgatacatttgaggaagcaattgatttagatgtggaagcgctcgaaaagcaactggttaaatacaaggaaaaacaacgtagcaaataaaaaaatcgcaaatattttgcgggaaagaaataaataactaaatttgcagccgtttcgctcgtgttagaacgtggcggttgcattttttagctagaatgcctctttagctcagttggccagagcacgtgatttgtaatctcggggtcgttggttcgaatccgacaagaggctcaaggatgagaaggttaattcttttagaaagatagacggaagctcgttctttgcgtagtgagaaaattattagggcaaataccagagtggccaaatggggcagactgtaaatctgctggcttacgccttcggtggttcgaatccatctttgcccacaatcagagtgacaactttggcaagaatgcggaagtagctcagttgatagagcattagccttccaagctgagggtcgcgggtttgagccccgtcttccgctcttttttcttgctgttatagctcagtggtagagcacttccttggtaaggaagaggtcccgggttcaaatcccggtaacagctcataagatgtaaatgctgattattaatcaaataaataacaagtaaagctatggctaaagagaaatttgaacgtaccaaaccgcacgtaaacattggtacaatcggtcacgtagaccacggtaagacaacgttgacagctgctatcactactgtgttggctaagaaaggtctttctgaattgcgttctttcgattctatcgacaacgctcctgaagaaaaagaaagaggtattactatcaatacttcacacgttgagtatgaaacagctaaccgtcactacgcacacgttgactgtccgggacacgccgactacgtaaagaacatggtaactggtgctgctcagatggatggtgctatcatcgtttgtgctgcaactgatggtccgatgcctcagactcgcgaacatatcttgttggctcgtcaggtaaacgttcctcgtctggttgtattcttgaataagtgcgatatggtagacgatgctgaaatgttggaactcgttgaaatggaaatgagagaacttctttctttctatgattttgatggtgacaatactcctatcatccagggttctgctcttggcgcattgaacggtgtagaaaaatgggaaaataaagttatggaactgatggatgcagttgatacttggatcccactgcctccgcgcgatgttgataaaccattcttgatgccggttgaagacgtgttctctatcacaggtcgtggtactgttgctacaggtcgtatcgaatcaggtattatccacgtaggtgatgaagttgaaatccttggtttgggtgaagataagaaatcagttgtaactggtgttgaaatgttccgtaaactgttggatcaaggtgaagctggtgacaacgtaggtttgttgctccgtggtgttgacaagaacgaaatcaaacgtggtatggttctttgtaaaccgggacagattaaaccgcactctaaattcaaagctgaggtttatatcctgaagaaagaagaaggtggtcgtcacactccgttccacaacaaataccgtcctcaattctatctgcgtactatggactgtacaggtgaaatcactttgccggaaggaacagaaatggtaatgccgggtgataacgtaactattacagttgagttgatctacccagtagcattgaacccgggtcttcgtttcgctatccgcgaaggtggacgtacggtaggtgctggtcagattactgaaatcatcgactaatacacaataattaatcagttctcggtgtaaatcgggaactgattatgtacaaacgggagtagctcagttggtagagcaccggtctccaaaaccgggtgtcgggagttcgagcctctcctcccgtgctaatattattgaaatgaaaaaggtaatagcttatattaaagaatcttacgacgaacttgttcataaagtatcgtggcctacgtattccgaacttgctaacagtgcagtagttgttttatatgcttccctgcttattgcattggtagtatggggtatggatgtctgtttccaaaacttcatggaaaaaattgtttatccacattaaaaacaggaattgaaaatggctgagattgaaaaaaaatggtacgttctgcgtgctattagcggaaaagaagctaaggtaaaggaatatcttgaagctgatcttaaaaacagcgaccttggtgaatatgtatctcaggtattgattcctactgaaaaggtttaccaggttcgcaatggtaaaaagattgtgaaggaaagaagttatcttcctggttacgttttagtggaggctgctctggttggtgaggtcgctcatcacctgcgtaatactccgaatgtgataggctttttgggtggttccgagaaaccggtacctctcagacaatcagaagtgaatcgtatacttggtacagtggacgaactgcaggaaacgggtgaagaactcaatattccgtacgtagtgggtgaaactgtaaaagttacttttggtccttttagcggattcagtggtatcattgaagaagtgaatagtgaaaagaagaaactgaaggtcatggtgaagatattcgggcgaaaaacaccgcttgaattgggctttatgcaagtggaaaaagaataacgcggaattgttacgctgttgttgttcttcgtttaatgtttatatataaatcaataaaaaaatggctaaagaagttgctggactaatcaaattacagattaaaggaggcgctgcaaatccatcacccccagttggacctgctctaggttctaagggtatcaatatcatggaattttgcaagcaattcaatgccagaacccaagacaaagcaggtaagattttgcctgttatcattacttactacgcagataagtctttcgattttgtaatcaagactcctcccgttgctattcaattacttgaagtagctaaggtaaagagtggttctgctgagcctaaccgtaagaaagttgccgagcttacttgggaacaaattcgtacgattgctcaggacaaaatggtggacttaaactgttttactgtggaagctgccatgagaatggttgcaggtacagctagaagtatgggtatcgctgtaaaaggggagttcccggttaataactaataaacttcaattgtaatgggtaaactgacaaaaaatcaaaagttagctgcagaaaagattgaagcagggaaagcatactcactaaaagaagctgcatctttggtaaaagaaatcactttttccaagtttgatgcttcactggatatagatgtacgtttaggtgttgacccacgtaaagctaaccagatggtgagaggtgttgtttcacttcctcatggtactggtaaacaagtacgtgtgttggtactctgtacaccggatgctgaagctgctgcgaaagaagctggcgctgactatgttggtcttgacgaatatattgaaaagatcaaaggtggatggactgatatcgatgtgatcatcactatgccatctatcatgggtaaaattggtgcactcggtcgtgtactcggtcctcgtggattgatgccgaatcctaaaagtggtaccgtaactatggatgttgctaaagctgtaaaagaagtaaaacaaggtaagattgactttaaagttgataagagcggtatcgttcatacttctatcggtaaagtatcattcagtgctgatcagattcgcgacaacgcgaaagagttcatctctacattgatcaaactgaaaccgaccgcagcaaagggtacatatattaagagtatttatctttctagtacaatgagtgcgggtatcaagatcgacccgaaatcagtggaagaaatctaataaaacagagaaataatgagaaaggaagataaaaattcgattatagagcaaattgctgctacggtaaaggaatatggtcacttctatttggtagacgttacagctatgaacgctgctgctactagcgcattgagaagagattgttttaaatcaggcatcaaattgatggtggttaagaacacattgcttcacaaagcacttgaaagcttggaagaagacttttctcctctttacgattctttgaaaggtactactgctattatgttttgcaacactgcaaacgttccggctaaactgatcaaggataaagcgaaagacggtattcccggactgaaagctgcatatgcagaagaaagcttctacgttggtgcagaccaattggatgctctcgttgcaatcaagagtaagaatgaagttatcgctgacatcgttgcattgttgcaatctccggcgaagaatgttatttctgctcttcaatcaggtggtaacacccttcacggagttctcaaaactcttggtgagagacccgaataattttcaaaaatcaacaaagtatttaaacaattaaaatcatacaaaaaatggcagatttgaaagcttttgcagaacaactagttaacttgacagtaaaagaagttaatgaacttgcaactatccttaaagaagaatacggtattgaacctgctgctgcagctgttgctgttgctgctggtcctgcagctggtgctgctgccgcagaagaaaaaacttctttcgacgtagtattgaagagcgctggtgcagctaaacttcaggtagttaaggctgttaaggaagcttgtggtcttggtttgaaagaagctaaagacttggtagacggtgctcctagcacagtaaaagaaggtttggctaaagacgaagcagaatcattgaagaaaacattggaagaagctggagctgaagttgaacttaaataacattggcctggtaatcaggtaattcggttaggaatccttcgcaagaggattcttaacctttttgtgtatatatttcaaattaagttctccaaattcattgacagatgtcttcaaatactgtaaatcaaagagttaattttgcttcgactaagaatccgcttgaatacccggatttcctggaagtacaattgaagtcattccaagactttctacaattagataccccacctgaaaagcgcaagaatgagggtttgtataaagtatttgctgaaaacttccctattgccgatacaagaaacaattttgttcttgagtttttggactattatattgatccgccgcgctataccattgatgattgtatagagcgtgggcttacttatagtgttcctttaaaagcgaaacttaagctatactgtacggatcccgatcacgaggattttgatacagtgattcaggacgtattcctcggcccgattccttatatgactgataaggctactttcgtcattaatggtgccgaacgtgtagttgtgtcacagcttcaccgttctccgggtgtattcttcggtcagagtgtgcatgccaatggtacgaaactttattcggctcgtattattccgtttaaaggttcgtggattgagtttgctactgacatcaataacgtgatgtacgcatacattgaccgtaagaagaaattgccggtaactactctgttgcgtgcgatcggcttcgagaacgacaaagatattcttgagattttcaaccttgcagaagatgtgaaggttaacaagacaaatctgaagaaagtgctgggccgtaaactggctgcacgtgtcttgaaaacatggattgaagatttcgttgatgaagataccggtgaggtggtttctatcgaacgtaacgaagttattatcgatcgtgaaaccgtactggaagaggagcatatagatgaaattctggaatcgggagttcagaacatccttttgcataaggatgaaccgaaccagtccgatttctctatcatatataatacgttgcagaaggatccgagtaactcggaaaaggaggctgtgttgtatatctaccgtcagttgcgtaatgctgatccggctgatgacgcaagtgcacgtgaagttattaacaacctcttcttctcggaaaaacgatatgaccttggtgatgtggggcgttatagaatcaacaaaaaattgaatctgacgactgatatggacgtacgtgtcctcacgaaggaagatattattgaaatcattaaatatctgattgagttaattaactcaaaggcagatgtggatgatattgaccacttgagcaatcgtcgtgtacgtacagtaggtgaacagctttctaatcagtttgccgttggtctggctcgtatgtcccgtacgattcgtgaacgtatgaatgttcgtgacaatgaagtgtttactccgattgatttgattaatgctaagaccatttcttctgttatcaattcatttttcggaacgaatgcgttgtctcagttcatggaccagacaaacccgttggctgaaattacacataagcgccgtatgtctgcattgggacctggtggtctttctcgtgaacgcgccggatttgaggttcgtgacgttcactacacgcattatggtcgtctttgtccgattgagactcctgaaggtccgaatatcggtttgatttcttcattgtgtgtgtttgctaagattaacgagttaggattcattgaaactccgtaccgcaaggtagaaaacggaaaagtggacctatctgataatggcctgatttatctgactgctgaggaagaagaagaaaaaattattgcacagggtaatgctccattgaatgatgatggtacatttgtgcgtaataaagtaaaatctcgtcaggatgctgatttcccggttgtcgaaccagcggaggtagatcttatggacgtttctccccaacagattgcatcaattgcagcttcattgattccgttcctggaacatgacgatgctaaccgtgcgttgatgggatcaaacatgatgcgtcaggcagttcctcttttgagaagtgaggcgccgattgttggtacaggtatcgaacgccagttggtcagagactctcgtacacaaatcactgctgaaggtgatggtgtcgttgatttcgtggatgctactactattcgtattttgtacgaccgtacggaagatgaagagtttgttagcttcgagccggctttgaaagaatatagaattcctaaattccgtaaaaccaaccagaatatgactattgacttgcgtccgatttgtgacaaaggtcaacgtgtgaagaaaggcgatatcctgacagaaggttattctactgaaaaaggtgagttggcattgggtaaaaacctattagtcgcttatatgccttggaagggttacaactatgaggatgctatcgttttgaatgaacgtgtggtacgtgaagacttgttgacttctgtacacgtagaagaatattctctggaagttcgtgaaacgaaacgtggtatggaagaattgacttctgacattccgaatgtaagtgaagaagctacaaaagatctggatgaaaacggtattgtaagaatcggtgcccgtatcgaaccgggtgatattatgattggtaagattacaccgaaaggtgaatctgatccttctccggaagaaaaattgcttcgtgcaatcttcggtgataaggctggtgatgtaaaagatgcttcattgaaggcttctccttctttgaaaggtgtcgtaattgataagaagctgttctcacgtgttatcaaaaatcgtagctctaagctggctgacaaagcattgttgcctaagattgatgatgaatttgaatcaaaggtagcagacttgaaacgtatcttggttaaaaaattgatgattttgaccgaaggtaaggtttctcaaggtgtgaaagactatttgggtgcggaggttatcgctaaaggctctaagtttagtgcatctgatttcgattcactcgattttacttctatccagttaagtaattggactagtgatgaacatgctaacggtatgattcgtgacttggtgatgaatttcatcaagaaatacaaagaactggatgctgaactgaaacgtaagaagtttgctattactatcggtgacgaacttccggctggtattatccagatggctaaagtatatattgctaagaaacgtaagatcggtgtcggtgataaaatggcaggtcgccacggtaacaagggtatcgtgtcacgtgttgtacgtcaggaagatatgccgttcttggctgacggtactccggttgatatcgtattgaatccgttgggcgtgccttctcgtatgaacatcggacagatttttgaagctgtgcttggacgtgccggaaagacattgggcgtgaaattcgcaactcctattttcgatggtgctacaatggaagatttggacgaatggacagacaaagctggattgcctcgttactgtaaaacttatctttgtgatggcggtacaggtgagcagtttgaccaggcagctaccgtaggtgtgacttatatgttgaagttagggcacatggttgaagacaaaatgcatgctcgttctattggcccgtactcattgattactcagcaacctcttggtggtaaagcacaattcggtggtcagcgtttcggagaaatggaggtttgggcacttgaaggctttggcgctgctcatatcctacaggaaattctgactattaagtctgatgacgtagtaggacgttcgaaggcttatgaagcaattgtgaaaggtgaaccgatgccgcaacctggtattccggaatccttgaacgtattgttacacgagttgagagggttaggcttgagtatcaacctagaataaaatactgaaagaatgtgtgatgtcaatgaacctatgaaggttcattgacattcgcaccttttcaatttctaatgattcaattatcaaatctcaattatatagagtatggcttttagaaaagaaaataagacgaaaagtaatttctcgaagatctcaattggtctggcttctccggaagaaatccttgagaattcgagtggtgaagttttgaagcctgaaaccattaattaccgtacttacaaacccgaacgtgacggtttgttttgtgaacgcatttttggtcctataaaggactatgagtgtcattgcggtaaatacaaacgtatccgttataaaggtatcgtctgcgaccgttgtggtgtggaagttactgaaaagaaggtacgtcgtgagcgtatgggacatattcagttggtggtcccggtggctcacatttggtatttccgttcgctccctaataaaatcggttatttgctcggattaccgacgaagaagttggattcgattatatactacgaacgttatgttgttattcagccgggtgtgaaagctgaagatggcgtagctgaatatgatttgctttctgaagaagagtatctggatattcttgatacacttccgaaagataatcaatatcttgaggataatgatccaaacaaattcatcgctaagatgggtgctgaagctatctatgatttgctggctcgtttggacctggatgctttgtcttacgaacttcgtcatcgtgctggtaacgatgcatcacagcagcgtaagaatgaagcattgaaacgtcttcaggtagtagaatcattccgtgcatcacgtggacgtaacaagccggaatggatgattgtacgtattgtaccggttatcccgcctgagcttcgaccgttggttccgttggatggtggccgtttcgctacctcggacttgaatgatctatatcgtcgtgtgattattcgtaacaaccgtctgaaaagactgatcgaaattaaggctccggaagtgattttacgtaacgaaaaacgtatgcttcaggaatctgtggactcattgttcgataactcacgtaagtcaagtgcagtgaagacagatgctaaccgtccgttgaaatctttgtctgacagtttgaaaggtaaacagggacgtttccgtcagaacttgttaggtaaacgtgttgactactctgcgcgttcggtaatcgttgttggcccggaattgaagatgggggaatgcggtattcctaaattaatggctgcagaattgtacaagccgtttattattcgtaaactcattgaacgtggtatcgttaagactgttaagtctgcaaagaaaattgttgaccgtaaggaacctgtgatctgggatattctggagcatgtaatgaaaggacatcctgtactgttgaaccgtgcaccgacattgcaccgtttgggtattcaggctttccagcctaagatgatcgaaggtaaggctatccagttgcaccccttggcatgtacggcatttaatgccgactttgatggtgaccaaatggctgttcacttgcctttgagtaacgaagctattcttgaagcacaaatgttgatgcttcaatcacataatatcttgaatccggcaaacggtgcgcctattactgtgcctgcacaggatatggttcttggtttgtactacattactaagttgcgtgctggtgcaaaaggggaaggtttgacattctacggaccggaagaagcgttgattgcttataatgaaggtaaggtagatatccacgctccggtgaaggtaatcgtgaaagacgttgatgaaaatggtaacattgtagacgtgatgcgcgaaacttccgtaggtcgtgtgattgtgaacgaaatcgttccgcccgaagcgggttatatcaatactattatctctaagaaatctcttcgtgatattattagtgatgtaattaaggtttgtggtgtagctaaagctgctgactttctggatggaatcaagaatttaggttaccagatggcattcaaaggtggtctgtcattcaacttaggtgatattattattccgaaagaaaaagaaacactggtacagaaaggttatgacgaagttgagcaagtcgtaaacaactataatatgggtttcatcactaacaatgaacgttataaccaggtgattgatatatggacgcatgttaactcagagttgtctaatatcttgatgaagactatttcttcggatgatcaaggtttcaactctgtatatatgatgcttgactctggtgcccgtggttctaaagaacagattcgtcagttgtctggtatgcgtggtttgatggcaaaaccgcagaaagcgggagcagaaggtgggcagattattgaaaacccgattttgtcgaactttaaagaagggctttctgtgttggagtactttatctctactcacggtgctcgtaaaggtttggcggatacggctttgaagactgccgatgccggttatctgactcgtcgtctggttgacgtatcgcatgatgtgattattacagaagaagactgcggtacactccgtggattggtttgtacagaccttaaaaataacgatgaagttattgcaactctgtacgaacgtatcttaggtcgtgtttccgtgcatgatattattcatcctactaccggtgaactgttggttgctggtggggaagaaattacagaagaaattgccaaaaagattcaggattctccgatcgagagtgttgaaattcgttcggtattgacttgtgaagctaagaagggtgtttgtgctaagtgttatggacgtaaccttgctacgagccgtatggttcagaaaggtgaagctgtcggcgtaattgctgctcagtctatcggtgagccgggtacacagttgacattgcgtacattccacgcaggtggtactgctgccaatattgcagctaatgcaagtattgttgctaaaaataatgcacgtcttgagtttgaagagttgcgtacagtagatattgtagatgaaatgggtgaagctgcgaaggtggtagtaggtcgtttggctgaagttcgtttcgtagacgtgaatactggaatcgttctttctactcataatgttccttatggttcaacactgtatgttggtgacggtgatttggtagaaaaaggcaagttgattgctaaatgggacccgttcaacgctgttattataactgaagcaaccggtaagatcgaatttgagggcgtaattgaaaacgttacttataaggttgagtcggatgaagcaacaggccttcgtgaaattattattattgaatctaaggataagacaaaagttccttcggctcatattttaacagaagacggtgacttgatccgtacgtataacttaccggtaggtggtcacgtgattattgaaaacggtcagaaagtgaaagctggtgaagtaatcgtgaagattccgcgtgccgttggtaaggcaggtgatatcacgggtggtcttcctcgtgtaaccgaattgtttgaagctcgtaacccgtcgaatccagctgtcgtttctgaaatcgatggtgaggtgacaatgggtaagatcaaacgtggtaatcgtgagatcatcgtaacttccaagactggtgaagttaagaagtatctggttgcattatctaaacaaatcttggtgcaggagaatgactatgtacgtgctggtactccattgtctgacggtgccactacaccggcggatattttggcgattaaaggtcctacggctgtacaggaatatatcgtaaatgaagttcaggatgtatatcgtttgcagggtgtgaagatcaatgacaagcacttcgagattattgtccgtcagatgatgcgtaaggtacagattgaagagccgggtgatactcgcttcttggagcaacaagttgttgacaagttggagttcatggaagaaaacgatcgtatttggggtaaaaaagttgtggttgatgctggagattctcaaaacctacaaccgggacagattgttactgctcgtaagttgcgtgatgagaacagtatgctgaaacgtcgtgacttgaaacctgttgaggttcgtgacgctgtggctgctacatctactcagattcttcaaggtataacacgtgctgctttgcagacttcaagctttatgtcagctgcttctttccaggaaacaacgaaagtattgaatgaggctgctatcaacggtaagattgataaattggaaggtatgaaggaaaatgtgatttgtggtcatttgattccggctggtacaggtcagcgtgaatttgagaaacttattgttggatcaaaagaagaatatgatcgtattttggctaataagaaaacagtacttgactacaacgaagtagaataatacaattcaattgactatatgagaaggagcagttgctatattgggcagttgctccttttttgttccttttttattggaatgtattatctctgtctcaggaaaaatgtgttattttgcaggataactttaatcatattaaacatggaagaacaaaataacaacgggcagttacagattgaattaaaagaagaagttgcacagggaacttatgcaaatcttgctattattactcattcgagttctgagtttattcttgattttgtacgtgtgataccgggtgtaccgaaagctggtgtgcaatctcgtatcattgtagctcctgaacatgcaaaacgcctactacgggcattggaagacaatatagctaaatatgaacgtgtattcggttcgatccgtatttctgatgagtctcttatttctcctttggcgagtgtaaaaggcgaagcgtgagggggatataaaaatattaaaaaataaaaaaaggttgtagtgcattgaatattcaaatattattcgtatttttgcagcccaaaatgtatagttacgaaattaatataacaataatataaatcaaaaaacaattaaaatgcctacaattcagcaattagtaagaaaaggacgcgaagtgctggtggagaaaagtaaatctcctgccttggattcatgtccccaaagacgtggcgtttgcgtgagagtatatactactactccgaagaagccgaactctgcaatgcgtaaagtagctcgtgtacgtttgactaaccaaaaagaggtaaactcttacattccgggagaaggacacaacttgcaggaacactcaatcgttttggtacgtggcggtcgtgtaaaggaccttccgggtgtacgttatcacatcgttcgtggtacacttgatacagcaggtgttgctggccgtactcaaagacgttctaaatacggagctaaacgtccgaaaccgggacaagctgcaccagctaaaaagaaataaggattaaaatctaattaaaattaaagtaataacttacgttttagtttgttggagatgctaagggttgagtaaattctccggagggagagttgaagaagtcaagaagtaacaaccaagaacaaaaacattatttttcaaacaaatgagaaaagcaaaacctaaaaaacgcgttatccttccggatcccgtttttaatgatcaaaaggtttctaagtttgtaaaccacttgatgtatgatggtaaaaagaatacatcttatgaaatcttttatgccgctctggaaacagtgaaagtaaaacttcctaatgaagaaaaatctgctctcgaaatctggaaaaaggctttggataatgtgactccacaagtggaagttaagtctcgccgtgtaggtggtgctactttccaagttcctacagaaatccgtccggaccgtaaggaatcaatctcaatgaagaacttgattctgtttgctcgtaaaagaggtggtaaatcaatggctgataagttagctgctgaaatcatggatgccttcaatgaacaaggtggtgcatacaagcgtaaagaagatatgcatagaatggctgaagctaaccgtgcatttgctcattttagattctaatactattaagatacaatcaattaaaaacttaaagtaaaggatataaaatggctaagcaagatttacatttgactcgtaatatcggtatcatggctcacatcgatgccggaaagacaacaacttctgaacgtatcctgttctacaccggattgactcacaaaattggtgaggtgcatgacggtgctgctactatggactggatggaacaggaacaagaacgtggtattactattacatctgccgcaacaactacacgatggaagtatgctggtgatacttataaaatcaacttgattgatactccggggcacgttgactttaccgcagaggtagaacgttcattgcgtattttggatggtgctgttgctgcttactgtgcagtaggtggtgtagaaccgcaatcagaaactgtatggcgccaggctgataaatataatgtaccacgtatcgcatacgtaaacaaaatggaccgttccggtgctgacttctttgaagttgtgcgtcagatgaaggacgttttgggtgctaatccttgtcccatcgttgtacctatcggtgctgaggaatctttcaaaggtcttgttgacttgattaaaatgaaagctatctattggcatgacgaaacaatgggtgctgattatagcgtagaagaaattccggctgaccttgttgatgaagctaacgaatggagagataaaatgcttgaaaaagtagctgaatttgacgatactttgatggagaaatatttcgatgatccttctactattactgaagaagaagtattgagagctcttcgtaatgcaactgttcagatggctgttgttccgatgctttgcggctcttcatttaagaacaagggggttcagacgttgcttgattatgtctgtgctttcttgccttctccattggatacggaaaacgtaattggtacaaatcctgatacgggtgctgaagaagatcgtaagcctagtgatgacgaaaagacttcagctttggcatttaagatcgccaccgacccgtatgtagggcgtttgactttcttccgtgtatactcaggtaagattgaggctggttcttatatctataactctcgttcaggcaaaaaagaacgtgtttctcgtctgttccagatgcactcaaacaagcagaatccggttgaggtaattggtgctggggatattggtgctggtgtaggttttaaagacattcacactggtgatactttgtgtgatgaaactgctccgattgtgcttgaatctatggacttcccggaaccggtaattggtattgctgtagaacctaagactcagaaagacatggataaattgtctaacggtttggctaaactggctgaagaagacccgacgtttacagtgaaaactgacgaacaaacaggtcaaactgttatttctggtatgggtgagcttcacttggatattattattgaccgtttgaaacgtgagttcaaagtagaatgcaaccaaggtaaacctcaggttaactataaagaagctattactaaaacagttgatcttcgtgaagtttataagaaacaatcaggtggacgtggtaagtttgctgatatcattgttaagatcggtccggttgatgaagacttcaaagaaggtggattgcagtttatcgatgaagtgaagggtggtaatattcctaaggaatttatcccgtcagttcagaaaggtttcacaactgcaatgaaaaatggtgtattggccggttatccgttggattcactgaaggtaactttggttgatggttcattccacccagttgactctgaccagttgtctttcgaaatctgtgctatccaagcatataagaatgcttgttccaaggcaggtcctgtactaatggaacctatcatgaagctggaagttgtgaccccggaagaaaacatgggtgacgttattggtgacttgaataagcggcgtggtcaggtagaaggtatggagtctagtcgttcgggtgctcgtatcgtgaaggcaatggttccgttggctgaaatgtttggttatgtaacagcgttgcgtactatcacttcaggtcgtgcaacttcatcaatggtttactctcatcacgctcaggtttctacttctattgctaaggctgtattggaagaagtgaagggacgtgctgatttactctaaaatatttaaagcagcagactagcgaatgactcttagtctgccgctttatcttattataaatatcttaatttaaaattgtaatgagtcagaaaattagaattaaattaaaatcttacgaccacaatttggttgacaagtcagctgagaagattgtaagaactgtaaaggctacaggcgctattgttagcggtccaattcctctgcctacgcataagcgtatctttaccgtgaaccgttcgactttcgtaaacaaaaagtctcgtgagcagtttgagttatcttcttataagagattgatcgacatttatagctcaacggctaagacagtagatgctctgatgaagttggaattaccgagtggtgtggaagtagaaattaaagtttgataattaaaaattagtgaaatgccaggattattaggaaaaaaaatcggaatgacatccgttttcagtgccgatggtaagaatgttccatgcactgttatcgaagcaggtccttgtgttgttactcaggttaaaactgtagagaaagatggctatgcagctgttcagttgggtttccaggacaaaaaggaaaaacatacaactaaaccgttgatgggtcacttcaaaagagctggggtaacaccgaagagacacttggctgagttcaaagaatttgaaacagaattgaatctgggtgatacagttactgttgagttgtttaatgacgctaactttgttgacgttgttggtacttcaaaaggtaaaggttttcaaggtgtagtaaaaagacatggttttggtggtgtaggtcagactactcacggccagcacaatcgcgctcgtaaaccgggttctatcggtgcttgttcttaccctgctaaagtatttaaaggaatgcgtatgggtggacaacttggtggtgacagagtcactgtacaaaacttacaggtattaaaagtaatcgcggatcataacctgcttttgattaaaggttctatcccgggttgcaaaggttcaatcgtattaattgagaaataatggaagttaacgtatataacattaaaggtgaagacactgggagaaaggttacgttaaacgaatctatcttcggaattgagcccaacgaccacgctatctatttggacgtaaaacaatttatggcaaatcagcgtcagggtactcataaatcaaaagaaagaagtgaaatcagcggttctactcgcaagatcggtcgtcagaaaggtggtggcggagctcgtcgtggtgatatgaactcgccggttcttgttggtggtgctcgtgttttcggtccgaaaccaagagattacttcttcaagttgaataaaaaagttaagacattggctcgtaagtcagctttgtcttataaagcgcaaaacaatgcgatcattgttgtggaggatttcacttttgaagctcctaagacaaaagatttcgttgcaatgacaaaaaatcttaaagtttccgacaaaaagctacttgtagttttaccggaagcaaataaaaacgtatatttgtcagctcgtaacatcgagggtgctaatgtgcagactatctcaggattaaatacttacagagtattgaatgctggggttgttgtgcttacagaaaactctctgaaggctattgacaatatcttaatttaaaaaggaggcttaaataatgggaattattattaaaccgttggtaacagagaaaatgactacaatcactgataagctgaatcgtttcggcttcgttgtgcgtcctgatgctaacaaactggaaattaagaaggaagttgaagctctttataatgttacagtagttgatgtgaatactgtgaagtatgctggcaaaaataagagccgttatacaaaagcaggtatcatcaatggacgtacgaatgcttttaaaaaggcaatcgtgacattgaaagaaggagatactattgatttttatagcaatatttaataaaaatggcagtacgtaaatttaagcccacaacaccggggcaaagacataaaattattggtactttcgaagaaattactgcatcagtaccagaaaagtctcttgtatatggtaagaaatcatctggcggtcgtaacagcgaaggtaagatgactatgcgttacattggtggcggtcatagaaaagtgattagaattgtcgatttcaagagaaataaagacggtgttccggcagtagttaaaacaattgaatacgatccaaatcgttcggctcgtatcgctttgttgttttatgctgacggggaaaaaagatatattattgctcccaatggattgcaagttggtgcgactctgatgtcgggtgaaacagcagcgccagagattggtaatgctcttcctcttcagaacatcccggttggtactgtaattcataatatcgaattacgtccggggcagggtgcggcattggttagatcggctggtaacttcgctcagttgacttctcgtgagggtaagtattgtgtgattaaattgccttcaggtgaagtaagacagattcttagtacttgtaaagctactatcggtagtgttggtaactcagatcatgggttggaaagttcaggtaaagctggacgttctcgttggcaaggacgtcgtcctcgtaaccgtggtgttgtaatgaacccggttgatcacccgatgggtggtggtgaaggacgtgcttctggaggtcacccaagatctcgtaagggattgtatgctaaaggacttaagactagagctcctaagaaacaatcgtctaagtacattattgagagaagaaaaaagtaatctgattaattgagtaaactatgagtcgttcattaaaaaaaggtccatatattaacgtaaagcttgaaaagagaattcttgcaatgaatgaatcaggcaagaaagtcgtagtaaagacttgggccagagcttcaatgatttcgcctgattttgtaggccatactgttgcagttcacaatggaaataaatttattcctgtttatgttaccgagaatatggtaggacacaagttgggcgaatttgctccaactcgtacattcagaggacacgctggtaacaagaaaagataataggaattatttgaaataataaagtaataaatataatgggagcaagaaaaaaaatatcggctgaaaaaagaaaagaagcccttaagaccatgtattttgctaaattgcaaaatgttcctacttctccgcgtaagatgcgtctggttgcagatatgattcgcggtatggaagtgaacagagcacttggtgttttgaagttttcttcaaaagaagctgctgcaagagtagaaaaattgcttcgctctgcaattgctaactgggaacagaaaaacgaacgtaaggcagaaagcggcgaattgttcgtaactaaaatttttgttgatggtggcgctacactcaaaagaatgagaccggcaccgcagggtagaggatatagaattcgcaaacgttcaaatcacgtaacattgttcgttggtgctaaaagtaataacgaagatcaaaattaaggtagatgggacaaaaagttaatccaataagcaaccgtttaggaattatcagaggatgggattctaactggtatggtggaaatgattacggtgattctttgctggaagatagcaaaatccgtaaatatcttaatgcaagacttgcaaaggcaagtgtatcaagaatcgtaattgaacgtacgctgaagctcgttactattactgtttgtactgctcgcccgggtattattatcggtaaaggtggccaagaagttgataagttgaaagaggagttgaagaaggttaccgacaaagatattcaaattaatatctttgaagtgaaaagaccggaactggacgctgtgattgttgctaataacatcgctcgccaggtagaaggtaaaattgcctatcgccgtgccattaaaatggctatcgcaaacacaatgcgtatgggggctgaaggtatcaaaattcagatttcaggacgtttgaatggagctgaaatggctcgttctgaaatgtataaagaaggaagaactccgttacacactttcagagctgatatcgactactgtcatgcagaagcgttgactaaagtaggtcttttaggtattaaagtttggatttgtagaggtgaagtatttggcaagagagaattggctccgaactttacacaaagcaaagaaagtggtcgtggaaacaatggtggaaacaacggcggaaagaacttcaaaagaaagaaaaataatcgctaaacgaatttgaattttaggaaactatgttacaaccgaaaaagacaaaattcagaagacaacagaaaggtcgtcaaaaaggtaatgcccaaagaggtaaccaattggcctttggttcttttggcataaaggctttggagactaagtggattacaggccgtcagattgaagctgctcgtattgcagtgacaagatatatgcaacgtcaaggacagatctggatccgtatattcccggataagccgatcactagaaaacctgccgatgtacgtatgggtaaaggtaaaggtgctccagagggatttgtggctcctgtgactccaggtagaatcattattgaagctgaaggagtatcttacgaaatcgcgaaagaagcattgcgcttagctgctcaaaagcttcctattacaacgaagtttgtcgtaagacgtgattatgatattcaaaatcaaaatgcgtaagtgttatgaaaattgcagaaattaaagaaatgactactagtgatttagtagaaagagtagaggcagaaacggctaattatgaccaaatggttattaatcattctatttctcctttggaaaatcctgctcaaatcaaacaattacgcaggactattgcgcgtatgaaaacagaattacgccaaagagaacttaacaataaatgatcagcttgatggaagcaagaaatttaagaaaagaaagaacaggggttgtgctgagcaacaagatggaaaagactatcacagttgcttctaaatttaaggaaaagcaccctatatatggtaagttcgttagcaaaacgaagaaataccatgctcatgatgaaaagaatgaatgcaatatcggtgatactgtacgcattatggagactcgtcctttgagcaagactaaaagatggagattagtagaaataattgaaagagctaagtaattatgatacaagtagaatccagacttacagtatgtgataacagtggagctaaagaggctttgtgcatccgtgttttgggtggaacaggtcgtcgttatgcttcagtgggggatgtcattgtcgtttcagtgaagagtgttatcccttctagtgatgttaaaaaaggtgcagtatcaaaggctttgattgtacgtacgaagaaagaaatccgtcgtcctgatggttcttatatacgttttgatgataatgcttgcgtgttgttgaataatgcaggtgaaattagaggaagtcgtattttcggtccagtagctagagaacttcgtgctacaaacatgaaagttgtgtcacttgcgcctgaggtactttaattttgtaaaagatttaagtaatgagtaaattacatattaaaaaaggcgatacagtttacgtaaatgctggtgaagataagggcaaaactggtcgtgtattgaaggttcttgttaaagaaggacgtgcatttgttgaaggtatcaacatggtgtctaagagcactaagccaaatgcaaagaatccgcaaggtggtatcgtgaagcaggaagcttctatccacatttcaaacttgaacccggttgatccaaaaactggtaaagcaacgcgtattgggagaaaaaagagttcagaaggaactctagtgcgttattctaaaaaatcaggagaggagatttagtaatgagtaatactgctagcctaaagaaagaatatgcagatcgtatcgcacctgcattgaaatcacagttccagtattcttcaacaatgcaggtacccgtacttaaaaagattgttatcaatcaaggtttaggtatggctgttgctgataagaagattattgaagtagcaatcaatgaaatgacagctatcacaggtcagaaggccgtagctaccatttctcgtaaagatatcgcaaattttaagttacgtaaaaaaatgccgattggtgttatggtaactttgcgtcgtgaaagaatgtacgaattcttggagaaactcgttcgtgtagctcttcctcgtattcgtgactttaaaggtatcgaaagtaagtttgatgggaaaggtaactatacccttggtattcaggaacaaatcatttttcctgaaataaatatcgatagtattacaagaattctcggaatgaatattacctttgtaacctctgcggagacagatgaagaaggttatgcattgctaaaggaattcggtttaccttttaaaaacgctaaaaaagactaatagatatggcaaaggaatcaatgaaagcacgtgaagtaaagcgtgctaaattagtagccaaatacgccgagaaaagagctgctttgaagcaaatcgtaagaacaggtgatcctgctgatgcttttgaagctgcacaaaagttgcaagagttgccaaagaattctaatccgattcgtatgcataaccgttgcaaactgactggccgtcctaagggttatattcgccaatttggaatttcgagaattcaattccgtgaaatggcatctaatggactgataccgggcgtaaaaaaagcaagctggtaattattgtttaaatattgtcagggtagtcctgattaatttaatttattttttatatgactgatccaatagcagattatttaacgaggttgcggaacgcaattagtgcaaagcacagagttgttgaagttcccgcttcgaatttgaaaaaagaaatcactaagattctttttgagaaaggctacattcttaactataagtttgtagaagatggtcctcaaggaactattaaggttgccttgaaatatgattctgttaacaaagttaacgcaatcaaaaagttagaaagagtatcttctccgggtatgcgtaagtatactggatataaagatatgccgcgtgttattaatgggttgggtattgctataatatctacttccaaaggtgtaatgactaacaaagaggctgcagaactgaagatcggtggtgaagtcttgtgttatgtatattaatttaggaggaattagcaatgtcaagaataggaaaattacccattagtatcccagctggagtgacagtcactcttaaggataatgtggttaccgtaaagggacccaaaggcgaaatgagccaatatgtgaatcctgctatcaatgttgccattgaagacggacacgtaactttaacagaaaacgataaagaaatgcttgataacccgaagcagaaacatgctttccacggtttgtatcgttctttggttcataacatggttgtgggcgtatctgaaggatacaaaaaagagttggaacttgtcggtgtaggttatcgtgcttctaaccaaggtaacattatcgaactggctttaggttatacacacaatattttcattcagttgcctgctgaggtaaaggttgaaactaaatctgaaagaaataagaatcctcttattatattggaatcgtgtgacaaacagttgcttggtcaagtttgctctaaaatacgttctttccgtaaacctgaaccatacaagggtaaaggtattaagtttgttggcgaagtaattcgtagaaagtctggtaaatcagccggcgctaagtaattcatataaaattagattattatgacaacaaaaatagaaagacgagttaaaatcaaatatagagtacgcaataaagtttcaggtactactgaatgtccgcgtatgagtgtatttagaagtaacaagcaaatttatgtccagattatcgatgatctttctggtaaaacattagctgctgcttcatctttgggtatgactgaaaaagtcgctaaaaaagatcaagctgctaaagttggtgaaatgattgctaaaaaggctcaggaagcaggtattactactgttgttttcgaccgtaatggttacttgtatcatgggagagtaaaagaagtggctgatgctgctcgtaacggtggacttaaattttaatcattatggcaggagttaataatagagttaagataactaacgatatagaactgaaagatagattggttgctattaatcgtgttactaaagttaccaaaggtggtagaacttttagtttctctgcaattgttgttgtaggtaacgaagaaggtatcattggttggggccttggtaaagcaggtgaagtaacagctgctatcgctaaaggtgttgagtcagctaaaaagaatctggttaaggtacctgtattgaaaggtactgttcctcacgaacaatcagctagatttggtggtgctgaagtattcatcaaacctgcatctcacggaactggtgttgtagcgggtggtgctatgcgtgctgtattggaaagtgttggtattactgacgttttggcaaaatctaaaggttcttcaaatccgcacaatcttgttaaagctacaatcgaagctttgagtgaaatgcgtgatgcaagaatgattgctcagaatagaggtattagtgttgaaaaagtatttagaggataaggaggagatatgtcaactataaagattaaacaagttaaaagtagaattggtgctccagctgatcagaaaagaactcttgatgcactgggacttcgtaaactgaaccgcgtggttgaacacgaaagcactccttcaattcttggaatggtagataaagtaaaacacttggttgccattgttaagtaattatttgttgaataataaaacgaattacaatatgaacttaagtaatttaaaacctgcagagggatctactaagacaagaaaaagaataggacgtggtaccggttctggcttaggtggtacttctacaagaggtcataaaggagctaaatcaagatctggatactctaagaaaattggttttgaaggaggtcagatgcctcttcaacgtcgagtacctaaatttggttttaagaatattaatcgtgtagaatataaagctatcaatctggatacaatccagaaacttgctgaagctaagagcttggttaaggttggtattaatgactttattgaagcaggatttatttcttcaaatcagttggtaaaagtattgggtaacggaactctgactaacaagctggaagtagaggctcatgcattctctaagactgcaactgctgctatcgaggctgctggtggaactgtagtaaaactctgattcaatgagaaaagctattgaaacattaaagaatatatggaagattgaggatctgagacagcggatcctcatcaccatattgtttgtggcaatttaccgttttggttcatatgtcgtgttgccgggtattaatccggctatgctggcaaaattacacgaacaaacaagtgaaggccttttagccttgttaaatatgttctctggaggagcattttctaatgcctctatttttgcattaggaatcatgccttatatctctgcatctatcgtaatccagttgttgggaatcgctgtgccgtatttccagaaattgcaacgcgaaggtgagagcggcagaagaaaaatgaatcaatatacccgttatctgacgattgctatattgttagttcaggccccttcttatttgctcaatcttaaaatgcaggctggcccttccttaaatgcttcattagattggactctgtttatggttacctctaccattattttggcagcaggtagtatgtttattttgtggcttggtgaaagaatcactgataaaggtattggtaatggtatttcatttattatcttgattggtattatcgctcgtttccctgatgctttgatacaagaagttgtgtccagagtggcaaataagagtggtggtctgattatgtttataattgaagtcgtattcttattgttagtgattggcgctgcaattcttttggttcaaggagtgagaaagattcctgtacaatatgcaaagagaattgtaggtaataagcagtatggtggtgcacgacagtatattcctttgaaagtgaatgctgctggtgtaatgcccatcatttttgctcaggcaatcatgtttattccaattacatttatcggtttttctaacaatgtaaataatgcaggcggtttcttgcatgcgtttacagatcatacaagtttctggtataattttgtttttgcggtaatgattatattatttacatatttctatactgcaataacaatcaatccgactcagatggctgaggatatgaagagaaataatggttttatccctggtatcaagccaggaaagaaaacagcagagtatattgatgatattatgtctcgtattactttaccgggttctttcttcttggctttagttgccattatgcctgcattcgccggtatatttggggtacaggccggatttgctcaattcttcggcggtacatctttgttaattcttgtaggtgtggttcttgatacactgcaacaggttgaaagtcatttgttgatgagacattatgacggtctgttgaaatcaggtcgtattaaaggacgcgctggtgtagcggcatattaattctttagaatagaaatgatatttcttaaaacagaagatgaaatagaattgctccgtcagagtaaccagcttgtcggtaggactcttgcagaggttgccaaggtggtgaagcctggtgtaactacacgtgagttggataaagttgctgaagaatttattagagaccatggagcaactccaacttttaaaggatttccgaatcaatacggggagccgtttcctgcatccatttgtacttctgtcaatgagcaggtagtacatggaattccgggagatattgttctaaaagaaggtgatatcgtatctgtggattgtgggacatatatgaacggtttttgtggagattctgcttatactttttgtgtaggagaggtggacgaagaaattcgtaatttgttgaaggtaactaaagaagcgttatatattggcatacagaatgcagtacaaggaaagagaatcggagatatcggatatgctattcagcagtattgtgagtctcattcttatggtgtagtgcgtgagtttgttggtcatggcattggtaaaaatatgcatgaggatccccaagtgcctaattacggcaagagaggatatggtcctttgatgaaacgaggtctttgcattgcaatagaacctatgattaccttaggagaccggcaagtgattatggaacgtgacggatggactgtgaggactagggatcgtaaatgtgctgcacactttgagcatacggtagctgtaggagctggtgaagctgatattttgtcttcattcaaattcatagaagaagttttaggagataaagcaatataatatggcaaagcaatctgcaatagaacaagatggagttatagttgaagcattgtcgaatgcaatgtttcgtgttgaattagaaaacggacatgagattactgcgcatatttcgggtaagatgaggatgcattacatcaaaatcctgccgggagataaagtgagagtcgaaatgtctccttacgacttatcgaaaggaagaattgtgtttagatataaataaaattagatatgaaagtaagagcatcattaaagaaacgcacgccagaatgtaagatcgttagacgtaatggccgtttgtatgttattaacaagaaaaatcctaagtataaacaacgtcaaggataatttattatttttgcaaaaaaaataatttagtatatggctataagaatagttggtgtagatttgcctcaaaacaaaagaggtgaaattgcgttgacctatgtatatggaataggtcgcagtagttcagcaaaaattttagataaagctggtgtggataaagatctgaaggttaaagactggacagatgatcaggctgctaagattcgtgagattatcggtgcagagtataaggtagaaggtgatcttcgttctgaaatccaattgaacattaagcgattaatggatattggttgctatcgtggtgtacgtcaccgtattggtctgccggttagaggtcagagcactaagaacaatgcacgtactcgtaagggtagaaagaaaaccgttgctaataagaaaaaagctactaaataataattgttgatatggcaaaaaaaacagttgcagctaaaaagagaaatgtgaaagtagacgctaatggacagttgcatgttcattcatctttcaacaatattattgtttctcttgcaaatagtgaagggcagattatctcttggtcatctgctggtaaaatgggatttagaggttcaaagaagaacactccttatgcagctcagatggctgcccaagattgtgctaaagttgcattcgatcttggcctgagaaaggtaaaagcatatgtgaagggtccaggtaacggacgtgagtctgctattagaactatccacggagctggtatcgaagttactgaaattattgacgtaactccgcttccacataacggttgtcgtcctccgaaaagacgtagagtttaatttacctttaacttacacaatgatcttgattttgtttttggattgcattaatttctctctgtaatcgcggctgcaacaaattaagttcatgaataaacaattaaatatttaaaagaaatggctagatatactggaccaaaatcaagaatcgcccgtaaattcggtgaaggaatctttggagctgataaagttttgtcaaagaagaactatcctcccggacaacatggaaattctagaaaaagaaaaacttctgaatatggtgtgcaacttcgtgaaaagcagaaagcaaaatacacctatggagttttagaaaaacaattccgcaatttgtttgaaaaagcagctactgctaaaggtattactggtgaggtgcttcttcaattgttggaaggtcgccttgacaacgtagtattccgtttgggtattgcccctacacgtgctgctgctcgtcagttggttggtcataagcacattactgttgatggtgaagtggtaaacattccttcatacgcagtaaaaccaggacaattgattggtgttcgtgaaagatctaaatctttggaagtaattgctaattctctcgcaggattcaatcatagcaagtatgcttggttggaatgggatgaagcttcaaaggttggtaaaatgctgcatattcctgaaagagcagacattcctgagaacattaaagaacatttgatcgttgaattgtattctaaataataattaatttcatggcgatattagcatttcaaaaacctgataaagtattaatgttggaggcggactccagattcggtaaattcgaattccgtccgttggaaccgggttttggtattactgtaggtaatgcattacgccgtatccttctttcttcattagagggttttgctatcactactatcagaatagatggtgtggagcatgaattttctagtgtacctggagtaaaagaggatgttaccaacattatcttgaatctgaaacaagtgagattcaagcaagtagttgaagagttcgagagcgaaaaagtgagcatcactgtcgagaattccagtgaatttaaagcaggtgacataggtaagtatttgactggatttgaagtgttaaatccggaattagttatttgtcatttagattctaaggcaactatgcaaattgatattacaattaacaagggacgtggttatgtgcctgctgatgaaaatcgcgagtactgcacggatgttaatgtaattccaattgactctatttatacaccgatacgtaatgtcaagtattctgtagaaaacttccgtgtagaacagaagacagactacgaaaagctagtacttgagattagtacagacggttctatacatccgaaggaagcactgaaagaagctgcaaaaattctgatttatcacttcatgttgttctctgacgagaagatcacgcttgaaagtaatgatactgatggcaatgaagagtttgatgaggaagtattgcatatgcgtcagttgttgaagactaagcttgttgatatggacttgtcagttcgtgccctcaattgtttgaaggctgctgacgtagaaacactcggcgacttagtacagttcaacaagactgacctgttgaaattcagaaacttcggaaagaaatcgcttaccgagcttgatgatttgctggaaagtctgaatctgtcgtttggaaccgatatttctaaatataaattagataaagaataaaaaatgagacataataaaaaattcaatcatttaggtcgtactgcttctcatagaagcgctatgttatctaacatggcttgctctttgatcaagcacaaaagaatcactacgactgttgcaaaggcaaaagctttgaagaagtttgttgagcctttgattactaagtctaaagaagatactacgaattctcgccgtgtcgtatttagcaacttgcaagataagattgcagtaacagagctgttcaaagaaatctcagttaagattgctgatcgtccgggtggttatactcgtattatcaagactggtaaccgtttgggtgataatgcagaaatgtgcttcattgagttggtagactataatgcaaacatggctaaggaaaaagttgctaagaaagctacacgtactcgtcgttctaagaagagtgccgctgccgaaactgctgctcctgctgctgttgaagctcctgcaactgaagaaccgaaagctgaatcagctgaataattttacagttattcttattcgatatagaaaaggctgctctgcaaagagtggcctttttatttgaagtaaatacctttttatttgagtaaggaggagcagattttggaattgagccgtatagagtatacgtctattccctaatgatattcacttgtttactaatcctaagataaattaaaagataacctgaataaacttttcgtgaatagaatctgttatatttgcaggagaatatggcaaaatttgtaaaggtaatattgtttctgttgcttacggtgactctccatggggtagcaagtaacgttttcactgagaaaccggtggaacagtctgaacttgccattacatattcaatgaaacaacacgagcagattagtgctcctgactttccttatgctccagtggctgaattgaacaatcttcaaagtcaccagatatcagtgacacgtattcagcgtgtacagcttggagagtatttcactactttaaggaacctactgcaatgctgcgccgaccgtgaaaattctctgtcacagcatagggggcgaatttataatactacaacttcttattactgtcagccgtcgagtgagtactatgtatttactttaaggcatattattatttagaattcatttattggtattatttgttttatggttatcgatatattttataccgatggtcctttttatctttatattattactaataaattaaattttaaatattatggcaactactcaaactattgatgctactatattcgcatcttcacatccagatatcgctaagcgtacaagtatttccggagttttattctcttcattcatgttgttggtgggtattttagcttttgcttctacttttgaactggaagataggtcctctactgtaagtatggctttaatggtgttcggaacgggactattccttgtaggtattttccgtcttttctggaagtcaaaggaagttgtttatctaccgaccggaagtattgcaaaggaacgcagtgtcttctttgatttgaagcacatggataagttggttgatatcgtaaattccggttcgttctctgcaaattcggatattaagagcgaaacaagtgggaacattcgtatggacgtaattctttctgaagataagaaatttgctgccgtacagctgttccagtttgtaccttatacttatcagccgataacatcagtgcattatttcactaatgaagatgcatcggctgtggtcgcttttctttcaaaaagtaatttgaattagaagctgttgagctaagattgttacacagaagaaggaacaactttagtttttgataaagagtggggattagtcgtcaatgacggcgatccccatttttttcattaagaaacaagcgttcatattttgggcgactccgtttctcatttgataagagaaggtgagttcgttgttcgtgatgtccgcttcgaaacagtagttacggatattctgtgggaaggattctatcaaggtgccgagcagaaggtcgtgagtagctatgataccgttggcgttcatattcataaactgcttgatgagagcgaaagagcctttttgtttatccatagagttggtgcctttcaatatttcatcaaggatgatgaaaagttcctctcctgcttcgagtttgtcaatgattagtttcagacgtttgagttctgcgaagaagtaagactcgttatcggtgagtgagtcgcttgtacgaaggctggtgacgaggcgtgccggatatatttccatttgctttgcccaaaccggtgcacctatgcaggctaaaagataattgatgcctacggtacgcaggtaagtacttttaccggccatgttggcgccggttatgatgataaagaaaggacgcttgtcgatatctattccgtttcgcacacatttgttgcggttcataagtggatgacccaaagcttcggctcgcagatgaaaggattgagagctgattttggggaagatataatccggatgattgtatgtaaacgttgctaaagagcagtaggcgtcgatttctccgattgtttctatccagcgggggaggtcggaagcatgagtttctttccatttctcgattcgcattacttggcgcagttcccaaaaaataagtccgttgaggattgtactcattaacaggttactgcgttgatcgagcgcgttcatcagtttcgatagttggcggactgcctgggaagctgtttgattctggcttgtaagttccgttttgagctgttgcagaacagggctgttcatttcctttttctctgtgagaagaatttggtcagcataagtagagaggatttgcaattttttgccgtaagttgcttgcagttttgtgatacctttagaaaagatagaactgaaaatgacgaaacaaaaaaacacacctccgggtacggtggcaggaagaattcctacaatggccgaacctatgcatataaggttgatgatgctaactactgtcgggatgatacgcagtagcgtatgcttccggtaatagctggggcttcccgcccattccctgatttcgttggtatcggcaggttttcctttataaagtaatccgaacagacggatttgttgccggtattccagatcggttgataattcccggatagcctcctggcgttgttcgatcgattcttttagttccagatgtgcgttgaaccaatcagccagatgctgcttgccgacaggcgttgaagtacggttgatatattggaaaagcgaataatcgccgaatacatccaagtcataagtatagagatgcgcagggtcgatatattcatttccgctgtcgaaatcggaaaaatcatattgaatggcccgtaactcctgttcgttgatttctattttctttttcagataatctttccggtaaaaccagagattatgtcgttttaccagccagataaatgatataaaaggcagaatggcaaagacgaaaagagataaccagccgtcgctccagaagataaaggctgccgctatggcttctacaaatagcacaaggcgtagaaggctgatataatagatgcgtttccgggccctctgaagagcttgttccgactcttgaataatttgctgataggttgagattatattttccagtttctccataattgctttgatactttttgcgcaaaggtaatatatttaacaacggacaggctatgagcttgtttttgtcaagagcagatttactgtttattaacgcaaagcgaataggaagcgaaaatgagagctgccggatgatgcattcagctctcgtaaatcctcgatgcaggaatagcaaagccaatttcgcgacttatgagagctaaccctacgctttacggggactaaacctacgctttgggagtgctaaccccacgcttaatgaatgttgagcctgtgttttagtaaaacgaagcctctgtttcacccgaacagagcctccgttttataaaaatagagcctgcatttcctcaaaaacaaaaggtgatttcttctttcggcacgatcagatataaaaaaagggagaatacactgcttccccctttacctgcatattaaatagaaatatattttgtaataacagatacaaagataacacatcaggaaggcaaagtcaagtattcagttacttttttggagactcttttccaaatttgatggtaatttagcaagtcggtgatgtcttcattcctcttttgggggaaggaagggggcggaaagtcgaggcggcaggtagatgcacagggttgataataaacgaattatgtgtttacctaccacctccccctacgggtactcctccttccggaaggaggagaatgaagataccaccgactggctaaattaccatcaaatttgaagaagaaccctttttttcaatatttctttttctgtccttgcatttatccgctaaaatgtataactttccactcgaaaaggcgttagaaaggaaaggaggaaggcttatgaaaaaaagatgtatcttatggctgttgatgagcgtgattggcctcccgttgattgcgcagaatattatctattccaacttgaaagagttgcttgctcaaaatggagacaccatagcagtgctacgtgtggagaaacgttccagaaatcagatcgtattgacaggcggggctgactaccgtataacggcaggcgatgatgagtctatgtgccgccgcttgaagaaacgttgttttgcagtgcgaagtgaagaaggagatttatatttgaactgtcgcaagctgcgctataagaaactgcgttttggggcatggtatgctccggcagttcagttaggcaagaatatctacttctgtgccatgcctttgggatcagttatcggtggcaattttgtagaagacgacgatgtaaaactcggaggaaatatcggtgacgcccttgccgcttcgagcttggtgaccaaacgcgtttgttatgaactgaatggggaaacgggcaagattgaatttctcggaaaagataagatgcttcaaatattggataagtacccggaatggaaacaagcttacctgaaggaagacagccaggaggcaaaagacacattcgactatttgctaaaactacgtgatagtcaagagaaatagggcagaggattctttgccatagctatcggttgtggtacgatttatgataaggcggttccggtacgccatatatgaggtataatacctttctgataataaatccatcatttcccttgtcttttactttcttttttcctacattgcggagagttatcaaactgtattgcttacagtttgtagtctttaattctgcttattatgaagataactcttggcaatacactacctccttatccggattttgtagaaggtatacggagaactcacgaccgtggctacatacttgtcccggtgcaggccaagttatctccggcggtaacttccacgacctgccgcttgccatttcctatgattttctataaggtaatggacaacctcgaacctatccttgccattgaactgatgaacaccgcacaaggtgtcgacttccgccgtccgttgaaaacgtcaccgcttctggagcatttcctccatacctgccggaaagaagtaccttttgtgaaagatgatatcgtgatgtacaaagaaatacataaaacagtcgcttttctgaaaaggacaaagtttgaatactgacaataaacagacccttttccaccttatcgttaataatggtgactgctgttgccggatgagtgtcgattttaatcgacatttatccggcttttgtcgggtgtaccccttccgataccgataaaactttacctcgcatctccttcctctttatctttgtgctgtgtttggtccgtatttcctcttaacacttgttttcatttctgtccaacgaatgataatatttatcaaatgggctacaaataaatggaaacttgatttcttaattgagttttctatatatctttgttccgtttttcctcccgatgcaagggaaaacagaaaactggattataatgaaatagaaaacgaacgatgacagaacatggaaaagacgcttcccaacgggcggagttgaaagaacggattatagcaacggcaacagaggcttttactacaaaaggtattaagagtattacgatggatgatattgcagcagcattaggtatctccaaacgtacgctttatgaagtttttgtagataaggaatcgttgctgaaggattgtatactgacggtgcaggcagaaagagaccggtatttacaggaagtttatgagcagtcccacaatgtgttggaagtgatacttgccgtattccaaaagagtattgagatgtttcataagacgaacaagcgtttttttgaagacatcaagaagtatccgaaggtatataatatgatgaaagagcgcagcgagagtgattcggagaaaaccatgtccttttttatgttgggagtggagcaaggcattttccgttcggatgtcaactttgcaatcgtcaatttgctggtacgcgagcagttcgatgtgctgttgaatacggatgtatgcaacgaatattcctttatagaggtgtatgagtctattatgtttacctatatacgcggcatctctacggagaaaggcgcgaaagtactggaagattttatatcagaatatcgtaggaaccgcatagaataagcgaccgatgaggttccggagacaaacaactaaaagatcaattagaaactagttttatgaacagaatgaagagactgacaggtaggaagatacttctggcaactgttgcactttgcgcatttggcattgcaaaagcgcaaaacgcacaagcggcgaaggacacactgaccttaaccttggacaaagccttaacaattgcgttggatgagaatcctacgatgaaggtggcggcagaagaaattgctttgaaaaaagtagccggcaaagaagcgtggcaaagtctgctgcctgaagcaagcatcgctggttcgctggaccatacgattaaagcggctgaaatgaagctgaacgatatgtcgttcaaaatggggcaggacggaacgaacaccgccaatgccggactaagcattaacctgcctttgtttgcaccggctgtctatcggacaatgtcgatgacaaagacggatatcgaactggcagtagagaagtcgcgtgcttccaaactggatttggtgaatcaggtaagtaaagcctattatcaactgatgcttgcacaagatagctacaacgtgcttctgggaagctacaaactggcggaagacaactttaacatcgtcaatgccaaatatgagcaaggcgcagtgagcgaatatgataagatcagtgctgaggtacagatgcgcagcattaagccgaatgtgatttcagcagccaatggggtgactctggcgaagttgcagttgaaagtgttaatgggaattaccgccgatgtagaacttaaaacagaagacagtctgacgaattatgaaacggctgtatttgccaatcaactgaaggatgaagaagtcggattggagaataacactaccatgaagcagttggacttgaacatgaaaatgttggagaagagcttgaaggtcgcaaaatcaagttttatccctacgttgtcgatgagtttctcatataactatcagtccttgtacaacccgaatattaacttcttcgagtataattggagtaatagttccagcctgatgttcaacttgagcattcctttgtacaaagcaagcaactttacgaaagtaaaatctgcccgtatccagatgcgtcaactcgattggaaccgcattgacacggaaagaaaactgaatatggaaatcgtaagttaccgcaacaacatggctgccagctctgagcaggtggtcagtaacaaggaaaacgtgatgcaggctgagaaggcggtactgattgccggtaaacgctacgatgtcggtaagggtacagtgctcgaactgaacagttcgcaagtatctctgactcaggctcaactcacttataaccaatccatttatgattatctgattgctaaggcagatctcgataaggtgctaggaaaagaataaagatagacaactaaaaaaattacaactaaggaatatgaaaaaaagtatccaattagtagccctgctgttaaccgtggttatgggctcatgtacgggtggaaaagataaagctgctacggaacacgtggttgagaagcccaaagtaaaggtggccgatgtgaaagcccgtcccgtagaccagattcaggaatatacggcaacagtagaggcggaagcgaagaacaacattgcaccttcatctcctgtgcgtatcgaccagatttttgtagaagtgggcgaccgtgtatccaaaggtcagaaattggtacaaatggacgcagccaatctgaaacagacaaaattgcaactggacaatcaggaaatagaattcaaccgtatggacgaactgtacaaggtcggcggtgcatccaaatcagaatgggatgcttcgaaaatgcagctcgacgtacagcgcacagcctataagaatctgttggaaaacacttctttagtaagtcctattaatggggttgtcacagcccgcaactatgacaacggagatatgtatagcggtggaaatcctgtgctggtagtagaacagatcactccggtgaaactcatgattaatgtatctgagagctacttcacgcaagtgaagaaaggtgcgccggtagatgtaaaactggatgtatacggtgacgagatatttaaaggtaccattaacctgatttatccgactatcgacgctgcaacccgtactttcccgatagagatcaagctggacaacagagatcagcgtgttcgtccgggaatgtttgcccgtgcaacgctaaacttcggtacggccgacaatgtcgttgttcccgatcttgctatcgtgaagcaagccggttcaggtgaccgttatgtgtatgtttacaaagacggcaaagtatcttataataaggtagagctgggtagacgtatgggaacggagtatgagttgaaatccggtgtgcccaataattcgcaggtagtcgttgccggtcaggcacgtttggcgaatggcgtggaagtagaagtagaaaaataataccttatcaccttaacacattataatatatgagtttatacgaaggtgcggttaagaaaccgattatgacctccctctgctttctggcagtggtgatctttggccttttctctttgtccaagttacctatcgacttgtatccggatattgatacgaatacaatcatggtaatgactgcttatccgggggcaagtgcttcggatatagaaaataatgtgactcgcccgttggaaaatacgttgaacgcggtgagcaacctgaaacatattacctcccgttcttcagagaatatgtcattgataacactggagttcgagtttggtaatgatatagacgtcctgacgaatgatgtacgtgacaagcttgacatggtaagttcacagcttcccgacgatgtcgagaatccgattatcttcaagttcagtacggatatgattcctatcgtactgctttccgtccaggcgaaagagagccagtcggcactttataaaattctggacgaccgcgtggtgaatcccttggcacgtattcccggtgtgggtacagtatctatcagtggtgcacctcagcgtgagatccaagtatactgtgaccccaataaactggaagcatacaacttgagtatcgaaacgatcagttccattatcggggctgaaaataagaacattcccgggggtaacttcgatatcggtagcgagacatattcgttgcgtgtagaaggagagtttgatgattcccgccagttggcagatgtagtggttggcacgcataatggagccaatatctttctacgtgacgttgctcgtatcgtcgatacagtagaggagcgtgcgcaggaaacctataacaacggtgtgcagggagctatgattgttgttcagaaacaatcgggtgccaattcggtagaaatctcccgcaaggtagaagaggcacttccccgtttgcagaaaaacttgccgagtgacgtgaagctgggagtgattgtcgatacgtctgacaatatcttgaacacgattgatagtttggcggaaaccgtaatgtatgctttgctgttcgttgtcattgtcgtgttccttttcctgggacgctggcgtgcaaccttgattatctgtatcacgattccgctttcgttgattgcctcctttatttatctggctatttccgggaatacgattaatattatctcgctttcgtccctttctattgctatcggtatggtggtggatgatgcgattgtggtactcgaaaacgtgacaacgcatattgagcgtggttccgatccgaaacaggcggctgtgcacggtacgaatgaggtggctatttccgtaatcgcttctacgttgacaatgattgccgtgttcttccctctgacaatggtaagcggtatgtccggtgtacttttcaaacagttggggtggatgatgtgtgcgatcatgtttatttccaccgtggcggcattgtcgttgacaccgatgctctgttcgcagttgctccgtttacagaagaaaccgtcgaagatgttcaaactctttttcactccgatagagaaggcgctggacgcactcgatacttggtatgcaaagatgttgaactgggcggttcgtcatcgtcccattgttatcgtgggatgtattgctttcttcattgtcagcttgctgtgtgcaaaggggatcggtacggaattcttccccgcacaggataatgcccgtattgccgtacagcttgagttgccgattggtacgcgtaaagagatagcgcaggaactttcggagaaactgacgaatcagtggatgaccaagtataaggatattatgaaagtatgtaactatacagttggtcaggctgactccgataatacatgggcttccatgcaggacaacggttcccacattatatctttcaacatcagtttggtggacccgggcgatcgtgacattaccctggaggcagtctgcgatgaaatgcgtgaagacttgaaaggatatccggagttcagtaaggctcaggtaatccttggaggtagtaatacaggtatgtctgctcaggcaagtgccgactttgaggtatacggatatgatatgacggtgaccgatagtgtggcagcccgtttgaaacgcgaactgctgaaagtgaagggcgtgactgaagttaacatcagccgtagcgattaccagccggaatatcaggttgacttcgaccgtgagaaactggctatgcatgggttgaaccttgcgacagccggtaactatttgcgtaatcgtatcaacggtgcagttgcttccaaataccgtgaagatggggatgaatatgatatcaaggtgcgttatgctccggaattccgtacaagtttggagagtctggagaatatccttatttacaatgcacagggacaatctgttcgtgtgaaagatgtcggaaaggtagtcgaacgttttgcgcctcctaccattgaacgtaaagaccgtgaacgtattgtgactgtttctgccgtaatctccggtgctccgttgggagatgtagttgctgccggtaacaaggtgattgataaaatggaccttccgggtgaagtgacgattcagatttccgggtcgtacgaagatcagcaggattcgttccgcgatttgggtacactcggtatcctgattgttatccttgtatttatcgtaatggcggcacagttcgaatcattgacttatccgttcattatcatgttctctctgccgttcgcgtttagtggtgtcttaatggcattgttcttcacgggcagtacgttgagtgtaatgagtttgttgggaggaatcatgttgattggtattgtggtgaagaacggtatcgtgctcattgactacattactctctgtcgagagcgaggcatggcggtgataaactctgtggtgacatctggtaagagtcgtctccgtccggtattgatgactactgcgacaaccgttttgggtatgatccctatggctatcggcggcggacagggttccgaaatgtggagtccgatggcaatcgccgtaatcggtggtttgacggtatctaccgtattgaccttggttctgattccgaccttgtattgcgtatttgcaggaacaggtatcaagaaccgtcgtcgtaaacttcgtcgtcaacgcgaattagatgtttacttccaggaccacaaagatgaaattataaagaaataacaggaaaaaaatatgaaatcagtattaataacattcgaccaggcttattacgaacgaatcatggcgttgctcgaccgtttgggttgccgcggatttacttacctcgaaaaggtacagggacgtggctccaagactggtgacccacattttggaagccatgcatggcctagtatgtgttcggctatccttacggtggtcgatgacagtaaagtagacccgttgttggatacactgcacaaaatggatttgcagactgaacagttgggattacgtgcatttgtatggaatattgaacggacgatctgataattgtccggtaaataaataactaagagggagaatctcataaataatgtagattctcccttcttttttcttgcttttctctatctttgcagcctgaaaatgtcaaagcaccattgagcttgtgctccggcgctgatgagcctctctcggcatcaggtaaggccaaggactaaaaaaggtgcttatatctattggtgaaatggagattataaagaattatttgaaatattcgttatggcttgtgctgactgtgtttgtcgccttattcgggcttcactggcttccggctataacgatcgacggacacacgatgaggcgcgtcgatatcctgggtgacctccgttatccggaaccggaaacggcagtagccgactcggatagcattcccttgcctcctgtcataaaaccggcttttgtggatacctgccgtgccggcatgacttgcatcgaagattatagtgactctacccagcgcggtatggctcctttttatgaagccctcgaccgcctttcatcttccccttcttcttctgattctgatgcggatgataaacttgtccgtatcgctgtattcggtgattcttttatagaagcggatattatgacagctgacttacgtgaaatgttccaaaaacgtttcggaggctgcggggtaggtttcgttacaattacttccatgacaagcggttaccgtcctacggtgcggcatacattcggcggttggtccagtcattcggtaatggatacggtatacttcgaccggaagaaacaaggcatctccggccattattttattcctcgtagcggggcgtatgttgagttgcggggacagaataaatacgcttctctgcttgatacctgccaacaggcttctatcttcttctataacagagattccgtgcaactctccgcccgtgtgaaccggggagaaagccggagctattctttaggtgcttccggccatctgcaaaaaatacaggtgaacgggcgtatcggttccatacgctggtcggtggaccgtgcagattctactcttttctatggattggcaatggacggaaagcagggaatcattctcgataacttctcgctgcgcggcagttcgggtttgtccttgcgtggcattccgaagcagatgttgaggcagttcaacgagcaacgtccttatgatttgatcattcttgaatatggattgaatgtagctaccgagcgtggccggaactatgacaactatcaaaagggattacttacggctatcaaccatttgaaagaatgtttcccgcaagcgggaattttattgctgagtgtcggcgaccgggactataaaaccgaaaccggtgatctccgtactatgccgggagtaaagaacttgattcgttatcagcagaatattgctgctgaaagtggtatcgctttctggaatatgtttgaggctatgggaggagagggaagtatggcgaaactggtacacgccaaaccttcaatggcgaactacgattatacacatatcaacttccgtggtggcaaacatctggcgggattgctatatgagacattgatatacggtaaggaacaatacgacaggaggcgtgcttatgagaaagagtaaacacctgcccggtttcattctcatccttacgcttataggaatattgggcgcccccttctctctttcggagttggcggcacaagaccggattcccgcctgcccccctcccggaaagaaacagaaaacaatcaaacccttgagggagatgaactgggcgaatgatactgtctctgtacagttttctttccctgccgctttccgcggaatgggaagaaatgagattgtcgacagcattgctttattgactcccgtatttgaacggctccgccaggtgcgtgccggattgtcggaagatacggtccgtattgttcatatcggcgatagccatgtgcgtggacatatctatccgcagactacgggtgcccgattgatagaaacattcggagcagtctcctacatagacaagggagtgaacggtgctacttgccttacttttactcatccggaccgtatcgccgagattgccgccctgaaacccgaactgttgattctctctttcggcacaaacgagagtcacaaccggcgctataatgtcaatgtacattataaccaaatggacgaacttgttaaattattgcaggatagccttcctaacgtatccattttactgactacccctcccggttcttacgaaagtttccggcaacggcggagacgccgcacttacgctgtcaatccccgcacggcaacagcgtccgaaaccattcggcgttatgccaaagagcaccgtctgctggtatgggatatgtacgatgtagtgggtggtaaacgtcgtgcttgtgtcaactggacggaagccaaactgatgcgtcccgatcacgtgcattatctgcccgagggatatatcctgcaaggaaatttattataccaggccttaatcaacgcttataatgactatgtttcccattgatatagatttcagccggatcaaagaggtgcttacttatgacccgcaggcaccgatgatattcagtagcggcatcttcctttggttgtttaccgctttcctggtggtgtatgtgctgttgcagcataaacacactgcccgcatcctgtttgtcaccctcttttcttattacttctattataagagtagcggcacctacttcttcctgcttgctcttgtcacggtttgcgatttctttttggcgcagctcatggcgcgtgccgaaggctattggaagcgtaaagggctggtagttttgagtcttagtgtcaatctgggacttctcgcttatttcaaatatacgaatttcctgggcggagtgattgcttcccttatgggaggggagtttacggcacttgatatattcctgcctgtagggatctcattctttactttccagtcgttgagttatacgatcgacgtttatcggaaagatataaaaccattgacaagtctgttggactatgccttctatgtgtctttcttcccgcaattggtagcaggacctatcgttcgtgcccgcgattttattccccaaatccggaaacccctctttgtgtcgcaggaaatgttcggacggggaatcttcctgattttctccggtttgtttaagaaagcaatcatctccgattatatcagtgtcaactttgtagaacgtattttcgataatccgacgctctactcgggcgttgagaaccttatgggagtatatggatatgccttacaaatctattgtgacttctcaggatatagtgacatggctatcggcattgccttattgctgggatttcatttcaatctgaattttaattctccttataagtcggcctccattacagaattttggcgtcgctggcatatctctttatccagttggctgaaagactacttgtatatatcattgggaggcaaccgaaaaggaaaattccgtcagtatctgaacctgataatcaccatgtttttgggtggattatggcatggggcttcctggaacttcgttctttggggaacatttcatggcattgctctggctttgcataaaatgtggatgtcaatcaccggacgtaagaaaggagaacagagtcatggctggcgtcgtgtcttcggggtgattattaccttccattttgtttgtttctgctggatcttctttcgtaatgcagatttccaaaattcaatggatatgttaaaacagatagttactaccttccgtccgcaactattcccgcaactgctggaaggttattggaaagtctttgcattaatgttactcggattcctgcttcattttgctcctgatagttgggaggatgcagtctgtcgaggtgttattcgcctgccgtttgtgggaaaggcattgatgttggtagtgttgatttatgtagttattcaaatgaaaagctcggagattcagccgttcatttatttccagttttgaagattttagtgttgtttaattatgtcgggaaatgtatttcaataatatgaagtatatttcccgattcttgtttatgcaggcttttttccctttctttgtagaagaaaaattgatttttgtaataggaaagataaatcgtgaatcttatggataattcattcgcttatcagccggcaaccgaacgttacgaacggatgcagtataaatattgtggtcggagtggtctgaaactacctcttatttctttaggattatggcataacttcggcagtgtagatgacttcaccatggcaaccgatatgataaagtatgctttcgatcacggtattactcatttcgatttggcaaataactacggtcctgttcccggaagtgccgaaacaaacttcgggcggattctaagagagaactttcaggggtatcgcgatgaaatgattatctcttccaaagccggacatgaaatgtgggcaggaccttatggcggtaacagttcccgtaaaaatctgatggcaagtattgatcaaagtctccgtcgtacaggattggagtatttcgatatcttttatactcatcgttatgacggagtcactccggtggaagaaacgattcaggcattgattgatatcgtgaagcgaggtaaggctctttatatcggaatatccaagtatcctcccgaacaagcacgtattgcttatgaaatgttggcgaaggccggtgttccctgtctgattagccaataccggtatagtatgttcgatcgggcggttgaggccgaaatccttccatttgctgcagcatccggttccggttttatcgccttctctcctttggcgcagggattattgacggacaaatacctgaatggtatcccggaacattcgcgagctgcccgttcttccggtttcctgcaacgctcgcaggtgacaccggagaaaatagaagctgcccggcaactgaatgaaatagcccatcgccgtgggcagacgttggctgaaatggcgttggcatgggtactgagagatgaacgaatgacgtcggtgatagtaggagctagttccgtgaatcagttggctgataacctgaaagcattggagcatttggagtttacgtccgaagagttagctgaaatagagcaaatattatccagaatgattttatagtaaccggaaaggggggcgtaaagtctcccttttttagtgatgattttttagtttgatagcttccttattatagttggccgaatttatctaaagtatttttgcaggttttccgtcagtctgcgaatagctgtagtcatgtgtgtattgacagtcctttcggatatatccagtgcttcactgatttgtttatagctcatgtggtcttcttttgccatacaataaacaattctggttttctcaggcagttgccggatagcttgctgcatacattcttccatatctttcttgagtaacttttcttccggcgtgaggtcgttttccggtatctctatgatgatttggtcaatagaacttaagttatcctgatggtttttctccaaaaatgtgatagcatgattcttggttgttataaataagtaagaatcccaatctttcacatccttcaagttctcacgtttatgccatagagtgagaaagacgtcggacagcacatcttcggccgaagaagtggactgaacgaaatataatgcaatagaatagcattttttgaagtaccgcttgtacattttttcaaagcaggaggagttaccctcactaatttgacttaatagataactaatgtcatcctctttatgtggcatattcaagaatttgattataaggtttttacaataaaaaattataatgtagaagcgtctattaacaatatttatttgcaaaagtaactttttatttgatttcaactacgtattttgagttttatttctgtctttatatatagaagcgcttaataatatttgtaaaaagatgaaagagaatagtagtatatgggacttgcttgctaaaagaactgatcattctttaagtaaagaggaagcagaggcactggagcagatgttaaaagaagatacttctttgcagcgtgcttctcagctggtggatgactcattggtgaatatggatacacggcaagtggaagaagtaatgaaccgtacttggagcaaggtagaatccggtatgaaagcaaacagaaagccacgattgaagttgattatccgtcgttgtgccgtggcagccagtattgctgtcctatgtgtgttgggtggtgtattgggttatcagctttgggctaaaccggatatgctgattgtgatgaaccaaggaaaagaagccttgctgttcacgcttcccgataactctaaggtttggctggggggtggttcgagcttgaaataccctgataagttatctgcacgtaatcgggaagtgtacttggacggtgaagccttctttgatgtgaaaaaagacaatggaagaacatttcaggtcgttacggagcttgtagaagtaaaggtgctcggaacccgttttgacgtaagagtatcggaagaggataatatggcagaagtagtcttggaatccggttcggtaaagttgaacgagcgcaacaaggcagaagacggagtaatcttacgacccggggaaatggggcgtgtcagccggcaatccggtattgaggtccgccatgtcgaccttcaactctatactacgtggaaagataaatatatgaatattgaatctcaaaaaatggaaaatgtaatgtttatgttgagtaaacgttatcatacggagattcgtattgaaggtgaggaattgaaagcagaaatattctcagggcgttttgacatagaccaatctctggagaatatttttgagacgattgatttgattactcccattcattatcaacagcaaccggatggaacctatttggtgactccgaaataaaaaaagaaataggcagcctaatattatgataaactaaaaaatgctaatcctaaaaagaaagatgatgaacacaacttgaaaaagaaaaaggatcggaaaattcccgttttccaatcctatccagattaaaattaactctaccaattattaattttaaattgcaaatttatgaaaaatatttcaatcccaaagggaatgagaggttttattttacctttatcctttttggggaagctaagactttgtacctggcaaatattatttctactgttttttatatcgctccaggcgcaggcacaacaatcagatttgttgactctgaatatgaaaaatgttacgctgaaacagtttgtagaagcggttcagacccagagtggttattcatttctttacaaagataatcaacttaaaacgaatcagcgaatcactgtatccgttaataaacaatcaattaatgttgctttagaacaggcttttaagggaaaaggaatttcttggaaaattcagggcaaacagattcttttgtttccggcaaaagaggaacagtctgtcaatacaaaaaagtcacgtaccatcaaaggtaatgtcaccactactaccggtgagtcgattccgggggcgagcgtaaaattggcaaatgctactactggtgtaattactgatattgatggattttacatgataacagttcctgataatcagtcagaattggaattccgttttatgggatatgaacccaggaatatcaaagtgggcaatcagactactattaatgtctctttggaagaagctacttccagtctggaagaggtagtggttgtggcatacggtgctcagaagaaagtgacgatgaccggatcggtagcttcggtgaatataggaagcctgaaaactccagttgccaatcttagcaatgctttgcaaggtaaggttgcaggtattatttccgtacagtccagtggtgaaccgggatatgataactcgacctttacaattcgtggaatcggtactttcacgggaaatacatctccattggtaattgtagacggtgtgcagcgtgacgatgtgaactccacttatggaggtgcttacaacaatattgacccggaagatatcgttagtatctctctcttgaaagatgcttctgctactgctgtatatggtgcgaaaggtgctaacggtgtgatgattattactactaaacgcgggtcggtaggtaagcctaaaatctccataaaggcagaaacgggttttaccaacttcactaaagttccggagatgttgagtggtgttgattatatgatgttatataatgaaagtcgtcgaaactcgggactgagtgaggtatattcccgtgaacagatattaaaaaccgagagcggactggatccttacttatatccgaatgtggattggatcgataagatttataagaatgtttcatctgtatctaatgtcaacctgaatattagtggtggtagcgacttggttcgatactacttgtccgcttctttctataaccagggaggacaatataatgtaaagaaggaaaacgggtatgacccgaacctgaattataagcgttatgatttccgtagtaacgtagacgtgaacattacaaaaactactttattacagatgaacctgtcggctattatgacagattcgcgttatccgggtatcgcttctaacaaactatggtatgaagctttctcaacttcaccggttgcttttcctgttcgctatccggacgggcgttgggcaggtcctccggccaatgctggttccaatccgatgaacgaagtgcagaacagcgggtacactgatactttccgtccggctttgcaatcggtatttaccgtcaaccaaaaattagatttcataaccaaaggactttcggcttatgctcgtttctcttttgacagttatagtgagttcaataataagcgtaccggaggggtagacttatggtataccaaccagcgtgacggaaacggagaacttgtctttggtaaaccgatcaaggaaggttctgatgaactttattatgaacatagcgatacgggagaaagagttatttatactgaagccaatatctcatatgatcgcactttcggtcatcataacgtaaatggaatggtgctttataatatgcgtaaccgtatgattgctactgccggaagtgccattgcttctattccatatcgtaatcaggcgattgctgcccgtttcggctacggatataaagaacgctatttagcagaggtgaacggttcttacaccggttcggagaactttgctcccggacatcgtttcggtttcttcccggctgcttctgtgggttgggtcatttcaaacgaaccgtttttcaagaatatgactcgtacggtagacttgttgaaattgcgtgcttcttatggtatcgtaggtaatgataacattggtggtacaggagaccgttttgcttattttactcagttcggaagcggaaacagctatggattcggaccgaacggaaatctcgtatacggtattagagagacgctgctggggtcggacaaactgacttgggagaaatcttataagacaaatattggtttggaaatgatgctttggggtaaattgaacttgacattggattattattgggaaagacgtaaggatattctgattcaacgttcttctttgccgagcatggcaggctttgacgcctctatctatgccaatatgggtgaaatggataataaaggagtagatgcgaatttggaataccagacccgtatcggtaacaaagtagggttgcgtttatttggtaatctgacttatagcaagaataagattgtgttccgtgacgaaccggctatgcaatacgcttatcaaaagagtgaaggtacccgttatggcgagttctatggatatatagccgaaggttatttccagagtgaggaagaaatcaaaaagagtccgagacagatgcgtgaactggcacctggtgacatcaagtataaagacttgaacgatgatggtgtgattgacgctaatgaccaatgttatttgggcaagtcttggttcccttcttggtcatacggtatgggctttaatatcaactatcataactttgacttggctctcttcttccagggagtgtcggatgtatctattatggccaatggtggttctattgataccggcaacggtgactggggagcaagtggagtcggtattgtacctttcaccggcatgggactgaatcccagcaatgtcatcaccaaagcattagatcgctggacggcggacaatcctcgtgcagatgcatggtatccgcgtatgacagctaatgcaacaacaaatgacaacaactatgtgaatagtacgcattggttgaaagatggcagttatctacgtttgaaacaagcctcgctcggatatacgcttgagaacaagaaactaatggataaaggaatagaatacctttatttctatctgtccggacaaaacttgctgacattctctaaattcaagttatgggatccggaacttggttctaatggggcaaagtatccgttatcgcgtatggtgacattgggaatgagagtttcgttttaatctaataaagcaatgaaaacaatgaaaaaaatatttagccgtatattggctgtcgggctgttgtccgccggcattataggagtctcttcttgtgattatttggaccagaaaccggagaacctgaaaactacggatatgatttgggaaacccgtgtggaggcggaagcttatttatataacatttacggatatatttggctgtctactgatgatccggttgtgttcggttttgctgatgaaacctcctgtgtcttttctaatacgaatgtccgtaatatggtagaaggcaactggggaccttccaatacattgggtgataataaatggagtgctgcttatcgaggtattcagaaagcgcttgtattcgagcaaaacatcgaccgtgttccggaaggtgtgttaagtactgatttgaagactcagtataaggcggaatcacgtttcttgcgtggttggttctattggaatctgttgcgtctgtatggaccgtttgttattttcgagaaacctgccgagcaagacgaagatttcaataattatgttcgccgtccatttgacgaatgtgtggagtatgtctgtggcttgatggaatcaacattgaatgtactgccggatgtatggacctcaacagcttatctgggacgtcctacgaggggggctgctttggcggtgatttcacaagctcgtttgttggcagccagtgaactctggaatggaaatccccgtttcaaggatttcaagaataaggacggagaattgttggcaccacagaccaaagatcaggaaaagtggcgaattgctgctgaagccgccgaagatgtgattgatctaggcatttatcatctttatcacaatacagaaagcggtgatagagaatttgacccgtatctgtctttccgcgaactgttcatgtccggcaatcatgctgaagttatatttgctactcataaatctggagactggcagtggggatatgataaacgttgtaacccgaagaatggcggatatagtatgcagaatgcaacgcagaatatcgtagatgcttttttgactcgtgacggactggatatcaatgatgacgagaattattcggaagaaggatttgcgcagaaagatgatccggacgaatacggaaaagtccgtaatgagattaaccggggataccgtaaaggagaatcgaatatgtacgttgatcgtgaacctcgtttctatgcttccgtacattataacggacgtccggtgctctctgccataactgttgacgaccgcaattatttttcttccgacaagaataaagatggattcggaagagctgaatattactattccggttcatcgggagcgggaacgcagatgaccgacttcaccgggtataatgtagccaagaaagtaagtacctcttccagtatccgtaacgatcaggcagtataccgcccgtatattcatattcgttatgccgaaatattattgaactatatggaagcgatgaacgaatacaatccggaagatcccaagattatcacttattttaatgagattcgtgaacgtgccggtattccgaatattacggttacctatcctcaggatttgggtgataaagaaaaaatgcgtgaatggattcttcgcgaacgtcagattgaactggcatttgaaggcgaccgtttctggacgcttgcgcgccggttactttatgagaaagaagagaatcgcaagatttatcgtatgaatgtacttgctgacgatcagggacaaggatttgcttttgaaggtttctatgaacgcaagttgttgcagaccagatattgggataataagatgtatttgtacccgattgctcagacagagattgaccgtggacgtggcttggttcagaatccgggttggtagaattttcctgaaaaatataaaactaataagatagcataatgaaaacaatttcatactatatatctatggttgttattttggcagcaaccattttcaccggttgtacggacgatgatgaaaagtcgttgtcacctcgtgccggagaactttctatctatgattttgctccgaatacaggaaaaggaggtacgcagttattgataaacggtgaacagtttcctttggatgcaacttctatcagtgtgagtattaatgaagtacaattatctattctgcgttccaatgaagagcagttattggtggaagttccggataatgaagcaataggaacggctcctattgtcattaagacaaatgggaagacaactcaatcggaagtgaactttatttttcagaaaacagccattacaggttactctcctgcttatggaaaggttgggacaaaggtacgtatctatgtagagaacttaccgacggaaatcaagaatccgtccgctacctacaatgggctagctgctgattgtacagttgaagaaggatatttcctggtgactattccggaaacagacttcggatcatatcctattgtaatcagttttaacggaagaactcttactacgggagattttgaatataaagaactcgtgttcgagcgtacagttaccactctgccgggaagttccgaatttaatattatgtgtgcggattgggaataccgccggggcggtatcgcagccgatgacaatggaaatgtttatttgacggatataggtaatttgcgcgtacgtaaaatcgcttctgacggcactgtcacagaaatggcgggtacaggtacggcagatgatgtagactggggaattaattggcggtatgataatggaggtacaggttcgtacaatgcagtggtacgtcctactgacttaaaggttgataacaaaggtaatatgtacatttgtgacgattggactggggcaaccgtatgtttcgagcctgatggaaaagcattgtatttgggttatcaggcagccattagtttggccattgatgaagcaagcaatcgtctttacagtatgaagtcaaacggagatattttgctcaaagacttgaacgattatggaggtgacccggcaagtgtgggcaacttgattattgccggtgcgggtgctggaaattgtggaggtatggatattgataaacgtacgggtgatctctatattaccaatatcggaactaaccagattattaaatatgtcaaggatcgttgggatacacctattgtaatagctggtaccggcaaaagcggatatgctgatggtccggttaatgaagcgacctttacttctccgtggggaatagcagttacggcagacggtaatatcttggtagcaggtaatggtacagcagaagcttcgacagttagtgccgaccaaagtattcggtatatagaccagaaaacgggaatggttaccacatttgccggttccggaacttccggaaatacggatagcagctttgaagtgctttcttatgcaggtgtcaattcagcgcttgaaagcctgccagccgcctttggtgcgccttcttctgtctgtgtcgataaggacggtacggtatatgtattagaccggcggaataattgtgtaaagaaaataacaaccgtagaaaaatgataagtcttatgaaactgaacactattcaatatataattttgattttactgataggtagtgtaaatctatttagcagttgtaaagacgatgacgggcacgatgctggtagtccggtagttgtgaatcgtttttatccgactagcggtagtgccggaacggaaattctgattaccggaaagaatttttctgagaatccggaagatatctcggtaactttaggaaacattcctttgaaagtgcttaattgcagtatgaacaacattctggctatcgtccctcctaaattgggggacggagagcttactattactattgccaaccgggaacccgttcgtactatcgagaagtttacttattcattctctgcggtagtcactacgttggcaggtagtgccaatggcgaaccgggatatcaggatggagttggaagtgaggcactgtttttctttgacgctgccaaagcagagccggctgaagactggaagaaaggttctgtttgcgtagatgatgacggaaatgtgtatgtaggcgactgcgtcaactactgtgtccgtaagattactcctgacggaactgtcacgactttggcaggactggccggaaataaaggttgcattgacggaacaggagtacaggcacgctttaacggactttacggaatggattgcgatgcggaaggaaatataattctgaccgatgtgttcgaatggaaaatcaggaaaataacacctgaaggagtgacaactacacttggagaaacagactttgaaccttggttcctgaccgtagataaacgcaatggagatatttttgtatcgtccagtagtggtatttacaaatggacggcagagggatctacccagataactaccggtaattttagagggattgttgtggataaggaaggtaatttgtatgcagccgaccagattctgaatggcattgtaaaattcaaagctggtacttgggaagcagagaatttgataggtaaaggaacatcgggctatctgaacggatcttttgaggatgcactctttacattcccgtctgatttagctattgattcgaacggtgatatctacgtagctggtaatggtgcgtgggacggtggagagaatcttgaccaaagtattcgcctgctcgatatgacaaacagagtggtacgcttggttgcaggtggcactcaggcaggatatgtggatgctaatgccggctctgccgctttctcaggacctcaggaccttgccgtagataaaaatggtgtgatttatgtctacgataagaaaaataatgtgataaggaagatagtttatgaataattaagggggaatgaggcggggaggagtgcttctgcatctttaagccgcctcttctgtttttcagtttttaatagggtatttaaaagaagtacaaatgagaaagaaaatgattctattggctcttaccttgttcatcgggcttagcgcgtgtggcaacgatgataaggaactaccggatgaaccgggaaaagaacaaggtggaaatggaggggatgaaccggaaagtcctgataacccttccggcaatgaaccggtaagctggtatgtggctaccacaggcaacgatggaaacagtggtactctggacagtcctctgaaaagtatttcaaaggcattgttgcgtgtcaatcccggtgatacgatttttctccgggagggtgcataccatgagtttgtcactcctactcgttcaggggaaaaaggaaaactgataacattaaaaagttatccgggcgaaactgctaagattgatgggaccggaatgacgatcaaaggttggttcagtgcattggtgcaactgaaaagtgtccaatatatgacttttgaaaacctgcatatctgcaatgctacgaattcggatgttaataccgacccggaaggggtatatatcaatggagtgtcaagagacatcactttccgtaactgtaaggtttataatataaaaagtacttgtcttgcaggacataacaacggtgactggcgtagtgcgcatgcgtttctagtcataggagatgataacggcacaccgatacgtaatctgacaattgaaaaatgcgaaatctacgatatgcataccggaaccagtgaaacgctgactattgccgggaatgttgacggttttaccatacaggattgcgaagtacatgatgtcgagaatatcggtattattgtggccggaggagacaacttgaatgcaggtggtaatatatccgtaaattatgcgcgtaacggagtggtgagacgaaacaaggtatatcggtgctctcatcaggtctcaaaggatttttgggaaggtgtttataataatcctgccgcttatggggcgattggaatctatgtttgcggaggtgcaagtactattatcgagcagaatatcgtgtgggaatgtgaccgtgctatcggtttggttagcgagagtaatgtgctggctaccaaagattgtattgtgcgtaataattttgtttacaacaactatcgtacgggaatttacctgggcgattatatcggatacacggtaggaggtacgtccggatgttatgttgtaaataacacgctctatcacaataacctggttggcggtgcgttgaacggaagcaataattcggaaaatatcaatgatgaaaaggatagcgagggtgagattcgcctggctgagaattgtactaataatacaataatgaacaacctcatttatgctgtgaccgatagggatatttttgtccgtaaatacacccggtccggtagcaagaacaaaatcggctacaatctctattattctccgacttctgccaatcacaagtggttttgggatagtgtagaatatacgaatttctcttcatggcagaaagccagcggagatgagaactcgctttataatgtcgatccgaaattggtgagtcttgacatatccgctcctgatttgcacttacaatcaggatcgcccgctaagaacgccggttatttcattgccgcctatttcgtaggtagctatgatattgatggtaatgcacgttacaatggaacaaatatcagcataggagccgatcagtaataaaacagattatagattaaattcaaagatattcaattaaagccaaatagaaatgagaaaaagtttttgttcgctcataagctttcttctatttagcttgttagcatgcggagctgcttctgcccattggtatgtggctccgactggtaatgatgcgaataatggaagtaaaagaaaacctttaaaaacaatagccgcagcactgcagcgtgtcaatcctggtgataccgttttcttgcgggagggatcatacggagagtttgtcgttccgacacgttcaggaaaacccggcaagatgataacgttgaaaagttatcctggtgaaattgctaaaatagacggttccgacctgtatgtcaaaggatggggcaatgcactggtacaggtcaataatatagactatatgcaatttgagaacttgcatatctgccatgcccacgattcggagaacaacacagatccggaaggaatttatataaccggaacgtccggtaacataacattccggggatgcaaagtatatgatataaagaatgactgcccgttagttgacgcaaaaggtgactggcgcagcgcgcacgcaattctggtcttaggtacggatgacaacacgccaattcgcaacctgctgatagagaagtgtgaaatcttcgaaattcatagcggcacaagtgaagcctttacattggcaggcaatgtggtcgacttcaccattcaggacaatgaagtacacgatgtggagaatatcggtatcatcattgcgggaggagataatctgaaccccaaaggcgatatttcggtcaattatgcacgcaacggggtagtgcgtcgcaataaagtataccgttgtacacacgaaaaatcgcaggactattggagccagtccgtatccaatggcggcgcgatcggtatatacctgtgcggcaacggaaacacgattgtagagcagaatgaggttttcgaatgtgaccgtggtatcgggctttgcagtgaaagttacaagttgcagaccaaggactgtatcgtacgtgataattttgtgtacaacaacttccgtaccggtatctatatgggagcttatctcggtttcgacggactaagtaccaaaaactgttatgttgtgaacaacactctgttcaataacaacctcaaaggcggccaactggacggcacgaacaattatctcaaagtgaatgatcgggataacagcagcgaaggggaaatccgtctttccgagttgtgtgaagagaatgtaatcgccaataatatcatttatgccgtatccgaccgggatatctttatccgcaaatacacaacttcgggaaagaataattatatcggtggcaatatctatttctcacccacgaagaagaaccataaatggatatgggatggtaaggagtacaccgacttttccgcctggcaggctgtaagtggtgataagacatcagtgttcgatgtagatccactattgaaaagtacccggctacaacaacctgacttacatttgaaatcctcttcgccggcgatagggacaggactcatatttcagggctatgtccggggaatgttcgacattgacggcgataagcgttgtgataatcatcgtattaacataggtgcagatcaataaagtgtccgccttttcactagtttaaatatacaaaccatgaaaatactaaaacaattcttttctgttcttttcgtgctgctgtgtgtagtaggcactggctatgccgctacgttcgatggcgtacgcgaacttgtgtcccgccgtgccccatggctgggaaaacatattcaattcaaggaaattgcgtcttcggacggtgattgtttcatattgcagactgtcggcaagaaattggtggtacaggccacgggagcaaatgcggcggcagtcggtgtcaactggtatctgaaatattattgccaccgcagtatgtctcatctaggtgaccagctcgcccccgttactgagcttccggtcatcggacaacctgtaacagtcaaaaccacatctatatatcgctatgcgctgaactactgtactttcaattataccatgagcttttatgactgggacgactggcaatgggaacttgactggatggcactcaacggcgtgaacctgatgcttgtagccaacggctcggaagctgtatggcaaaacacgctccgccggatgaactactcggaaaaagagattgccgattttatcaccggaccggcttataatgcctggtggctaatgggaaatatcgaaggttggggtggccctatgcctcagtcacagatagacagtcggaagaaactggtgcagaaaatgctgaagcgtatgaagtcattggggattgagccgttaatgcccggattctacggaatggtgccgagcaacctgaaaaacaagagtaaggcgcatatcattccgcaaggaacttggggtgctttcacccgcccggatattctggatcctatggacccggagttcgatcgtgttgcagccatcttttatgacgaaacccgccgtttgtacggttcggacatccgtttcttctccggcgacccttttcatgagggaggagctacggacggcgtagcgctgggagatgcaggacgagctatacaaaaaacgatgcagaaacattttcccggatctatctgggtgttgcaaggctggcaggacaacccgaagccgggtttgctggaaaagctggataaacgctatgtattggttcaggaattgttcggggagaataccaataactgggaaactcgtaaaggctacgaaggaacgcctttcatttgggctactgttacaaatttcggcgaacgtcccggtatcaacggaaaattacaacgttttgccgatgaagtttaccgtgcctcgaatagcgaatatgcgaagtatatgaaaggggtaggtatcttgcccgaaggtataaacaacaatcctgttacgtatgaattgttacttgaactggtgtggcacaaagaccgggtggatgtagaccaatggatagaatcttatgttacggcccgttacggacgtatcaccgatgaaatacggactgcctggaagatgatgttgaaatctatttatagcagtgaagtcggttatcaggaaggaccgcccgaaaacatcctgtgcgcacgtcccgcacttgaactcaaatcggtttcctcttggggtagactggctaagaagtatgatagagatctttacaagaaagcagcgttcctttttgccaaggcaatgccggaatttaatgaggttcgtacctatcgcattgatctgatacacttcctgagacaagtcattgccaatgaagctgattcggtgttctatgatatgataactgcctatcaagagaaaaaagttgagaaatttgagcaggaagtttccaaatttctgatgatgatcgataccgaaaatgagttgttggcacaggacccgtttttccgtctgagcacttggcagcaacaggccaaagatgcaggaaatacggtcgcagagaaaaagaacaacttccacaacctgatgatgcttattacctattggggagaacatgtgacatcggaagacaatttgcatgactatgcctataaagaatgggccggcatgatgaacacctattataaggagcgttggctcgtttacttcgattacttgcgtgcgttgcttcgcggagaggaagcgaaagcgcccgattatttccattgggaacgcgaatgggtggaaaagaatttgcacatggcggacgatgcgccacgaatgtctttggaagaaattgtaaataaggtcactgacaggtaatattgttttatgtaaaaagaatgaaagttatgaacaggatatttatcagtttaatgattacccttctgcttgtaggcttttccggttgcgggcagaagaaaagcaccatgcatccccttgtggtggctactccggaacgtccttcagggcaggaggacgtcattcaactaactgctcccaagatggacacggtacgcgtgggatttatcggactggggatgcgtggtccgggagctgttgtccgttttacacatattccgggtatccaaatcaaggctttgtgtgatatacgtcaggaatgtgtggaaaaagcccagaacattctcaaggaagccggtttgccggaggctatgacctattacggtgatgagaactcctggaaacagttgtgtgaaagggatgatattgaccttgtgtatgtggctactgactggaaacaccatgcggaaatgggagtgtatgctatggaacatggcaaacacgtagctatcgaagttcccgctgccatgacattggaggagatttggagtttgataaatacttccgaaagaacccgcaaacactgtatgcaactggaaaactgtgtatatgatttctttgaactgacaacattgaacatggcacagcaaggagttttcggcgagattctgcacgttgagggcgcttatattcataatttggaagattattggtcttcttactggaataattggcgtatggattataatcgcaacaatcgtggggatgtctatgcgacgcatggcattggcccggcttgccaactactcaatattcatcggggagacaggatgaagacattggtggctgtggatacaaaggcggttaacggaccggcatatatccggaaaaccacgggcgaagaagtaaaagatttccagaacggtgaccagacaactactgtcattcgcacggaaaacggtaagacaatgctcatccagcataacgtaatgacgccacgcccgtatagccggatgtatcaactggtcggcactgacggatatgccagcaaatatccggtggaggaatattgcctgcgccccgaacaggtagatacgaatgttgttgccaaccatgaaaacctgaatgcgcacggttctttgcccgaagatgtgaaacgggaattgatgaacaaatataagcatccgattcatcaggaactggaagaaacagccaaaaaggtaggcggccatggtggtatggattatatcatggattatcgtctggtgtattgtctgcgcaacggattaccgttggatatggatgtgtatgatctcgccgagtggtgttgcatggctgagttgactcgcctctctttggaaaatggttcggctccggtggctgttcccgactttacccgtggaggctggaataaggtaagtaaattccggcatgcatttgtacaataggtatagaaataaaaatataacaatcatctattatgaataaaggacaaaggctttataagttcatactgggtttgctcatgccgtttctgtttttggcttgctcctctaaagagcgtattaagatagacggcggaactttcaatgttgacggtaaggatgtgcagttgatttgcggcgagatgcactacgcccgtattcctcacgaatattggcgcgaccgtttgaaaagggcacgtgccatgggattgaatacaatatcagtctatgtgttctggaactttcacgaacgacagcccggtgagtttgatttcagcgggcaggcggatgttgccgaatttgtacgtctggcacaggaggaaggcttgtatgtgattctccgtccgggtccgtatgcttgtgctgagtgggacttcggcggttatccttcctggttgttgaaagaaaaggacatggtctaccgcagcaaagatccccgcttcctggagtattgcgaacgttatataaaagcgcttggcaaacaactggccccgttgacggtcaataacggcggaaacatattaatggtgcaggtagaaaacgagtacggttcgtatgcggcggataaagaatatctggcaactctccgcgatatgataaaagatgccggattcaatgttccgctatttacttgcgacggtggcgggcaggttgaggccggacacatcgacggtgcattgccgacattgaacggagtgttcagcgaagatatctttaagatcatcgataaatatcatccgggcggtccgtattttgtggcggaattttatccggcctggttcgatgtgtggggacagcgccattcgacagtcgactataaacgccctgccgagcaactcgattggatgttgggacaaggcgtatccgttagtatgtatatgttccacggaggaacaaatttctggtacatgaatggtgccaatacggctggaggatatcgtccgcagcccaccagctatgattatgacgcgcctctgggtgaatggggaaactgttacccgaaatattatgctttcagggaagtcattcagaagcatctgcctcatggaaccgtattgcccgaggttcccgccgacaatccgacaacaaccttcgcaacgattgaactgaaagaaagtgctcctttgcaggctgcttttcaccagactaccgaatcggaaaatgtcctttcaatggaagatctgggagtcgacttcggttacatacactatcagactaccataaacaaggcaggcaaacagaaactgattatacaggatttgcgtgattatgccgtaattctggttgacggaaagcaagtggcaagtctggatcgccgttacaatcagaataatgtaatgctggatatacagaaagctcctgctaccctggagatactggtagaaaatacaggacgtgttaattatggtcccgatattttgttcaaccggaaaggaattacgaaccaggtgctgtgtggagatgaaaagttgacaggttggtctatcactcctctgccgctttataaagagaaagtttcggaaatgaactttggcgaaagtatccagggaaaacctgctttccataagggaatatttaccgttcggcagaaaggcgactgtttcgttgatatgagccgttgggggaaaggggctgtctgggtaaatggtaaatcgctcgggcgtttttggaatatcggtcctcaacagactttatatctgcctgccccatggttgaaagaaggggagaatgagattgtcgtttttgaaatggaagataccggaaaccgtgttctgcaaggactggaccgaccgattctcgacagcctcggtgtagacaagaattatcagaagggacagcttcgtgtggttacgggtactcctacgctcgacgaaggggatatcattctgaaagttactttgaaagaaatgaacgagtggcaacagttcgatttccctgttgctgcaaccttccgtcatttttgcatcgagactctttcctcgtatacggatgacaatcaggcttgtatctcggaagtggaattgctggatgataaaggtcaggtgattgataaaacgaaatggaaagttgtctatgtagacagtgaactggcggaccagaatctgggagtaggggagaacttatacgacggagatgtttcgtccttctggcatacggacccgacagcgaaagcttctcatccgcatcagatcataattgatatgcaggagatatataaagttactgctttccgggtgaaagtgcgcgaaggctcattcttatccggtaaagtaaaagagttccaattatatacccgtccgcagttcttcctgtttcattgataagataaatcagggagatacgtcaaaaaactaagtaatgttttaccgtagggatgtggtttgcctgtctgaagataatttgttatatgtcttcaggcaggtatcttcctgtcccttacggtagatctttttttggggatggcatctctcttaaaatctataagctgaataacttgaacttagttttctaccagaaaagatttttcagtttcatatctcatattctcatgtttttttgtataactaatttactctcaattaattaatttatgagaaataaaaaggaacggagttatttctcatagccccctttcctgttctttcttctctctactccatatttttctcctgccatatgcttctttttctgcagttttccctttaataccatatgctatgttcatgtttttttaatattacgtctttctccttgtgcttttcccctatcctcttttttgttccactccggtggccgggctttttcactccggtggccggttctttccactgaagttccctgtcctgttcattgtagtggaacgaacagcatgtcttttcgattatccgttattctcctccttccggaaggatgattcgcctcaggggtaggtggtatgtaaatgtcggaatgggtaattccccgctttttatatccggcctgttttttttagtaccgaataaatctgcctgcattacttgtttctttgtttagtgctttcctccctcgtttaaatataataatgtgtatagttttgtattcttcccttcgtagcttcttgtatagaaacggcggttttcttgaaccagcctatcaatcagcaagttagtctgattataaaaaaataatcagaaaaaagagtgatatatatttgttttgtatcctgaaagggagtacttttgcacccgctttccgagagaagaaagccttgatgaaaatgacttagtgacaaagcgcaggactgcttgactcaagaacaaaaaaaacttccgaaaagttttggaatataaataaaaaagttcttatctttgcagtccgattcgcaaagaaaaggtgttttgcttgttcttctttctatttattctttccctttcgcatagagagtctgagaaacggataaaaagaaaaactgaaaaaaaacttccgaaaaagtttggtagttaaaaataaacctcttacctttgcacccgcttttgaaacggaagcgacaagttctttgaaatattgataaacaatacaagtagtacaagaaaagatagaaccgtcaatacagtctgttatatatgttcatatatatgtgatagatataggtattagaatgaagtcaataaattgtacggcatcctgaacagagctataaccggcatatgccgattaaaaaatacttttacaatgaagagtttgatcctggctcaggatgaacgctagctacaggcttaacacatgcaagtcgaggggcatcagtttggtttgcttgcaaaccaaagctggcgaccggcgcacgggtgagtaacacgtatccaacctgcctcatactcggggatagcctttcgaaagaaagattaatatccgatagcatatatttcccgcatgggttttatattaaagaaattcggtatgagatggggatgcgttccattagtttgttggcggggtaacggcccaccaagactacgatggataggggttctgagaggaaggtcccccacattggaactgagacacggtccaaactcctacgggaggcagcagtgaggaatattggtcaatggacgcgagtctgaaccagccaagtagcgtgaaggatgactgccctatgggttgtaaacttcttttatatgggaataaagtggtccacgtgtggatttttgtatgtaccatatgaataaggatcggctaactccgtgccagcagccgcggtaatacggaggatccgagcgttatccggatttattgggtttaaagggagcgtaggcggattgttaagtcagttgtgaaagtttgcggctcaaccgtaaaattgcagttgatactggcagtcttgagtgcagtagaggtgggcggaattcgtggtgtagcggtgaaatgcttagatatcacgaagaactccgattgcgaaggcagctcactggagtgtaactgacgctgatgctcgaaagtgtgggtatcaaacaggattagataccctggtagtccacacagtaaacgatgaatactcgctgtttgcgatatacagtaagcggccaagcgaaagcattaagtattccacctggggagtacgccggcaacggtgaaactcaaaggaattgacgggggcccgcacaagcggaggaacatgtggtttaattcgatgatacgcgaggaaccttacccgggcttaaattgcaaatgaattatggggaaacccataggccgtaaggcatttgtgaaggtgctgcatggttgtcgtcagctcgtgccgtgaggtgtcggcttaagtgccataacgagcgcaacccttatcttcagttactaacaggtcatgctgaggactctggagagactgccgtcgtaagatgtgaggaaggtggggatgacgtcaaatcagcacggcccttacgtccggggctacacacgtgttacaatggggggtacagaaggccgctacctggtgacaggatgccaatcccaaaaacctctctcagttcggatcgaagtctgcaacccgacttcgtgaagctggattcgctagtaatcgcgcatcagccatggcgcggtgaatacgttcccgggccttgtacacaccgcccgtcaagccatgaaagccgggggtacctgaagtacgtaaccgcaaggagcgtcctagggtaaaactggtaattggggctaagtcgtaacaaggtagccgtaccggaaggtgcggctggaacacctcctttctggagcgatgtcgttacaatgacttcatggttcatttcctttaggggaatattgaaccgggttctgttcagattgtactactggtacttgtttatttataatatatagatcaaccatctatagtaatatagatagagataaacaagagaaaacagaagccgagtctaaagacagacacggttgaactagtcctatagctcagttggttagagcgctacactgataatgtagaggtcggcagttcaactctgcctgggactactccgaaacgactcttacgggggattagctcagctggctagagcatctgccttgcacgcagagggtcaacggttcgaatccgttattctccacatccccagcaatgggaaacgatctttgacatgatgtacaaaaagtaaaataaaagtaaagagctaaaagtatatatcaaaccgtactctctccgatatttcccatttcagtaatggatagttttcggagcagtcagtttgaaagaaagtaagcaagggcgcatggcggatgccttggctctcggaggcgatgaaggacgtgataagctgcgataagcttcgggtaggtgcaaataacctttgatccgaagatttccgaatgggacaacccgacattctgaaggaatgtcatcctgcttggcaggaggctaacgcagggaactgaaacatcttagtacctgtaggaaaagaaaataataatgattccccaagtagtggcgagcgaacggggattagcccaaaccaatgttgttacggcaatattggggttgtaggaccacgttgtcgcaagacattcagtgagaagaattctttggaaaatgaaaccatagacggtgatagtccggtattcgaagctgaacgaagcgtagtggtatcctgagtagcgcgggacacgaggaatcttgcgtgaaccagccgggaccatccggtaaggctaaatactcccgagagaccgatagcgaaccagtactgtgaaggaaaggtgaaaagcacttcgaatagaagagtgaaatagtccctgaaaccatgcgcctacaagcggtcggagcagcttatgctgtgacggcgtgccttttgcataatgaacctacgagttactttttccggcaaggttaaggatctggagatccgtagccgaagcgaaagcgagtctgaacagggcgataagtcggaaggagtagacgcgaaaccaagtgatctacccttggccaggttgaaggttaggtaacactaactggaggaccgaaccgataagcgttgaaaagcttccggatgagctgagggtgggggtgaaaggctaatcaaacttggagatagctcgtactccccgaaatgcatttaggtgcagccttgtgagttactaatgtgaggtagagcgactgataagatgcgagggcttcaccgcctatcaagtcttgataaactccgaatgcgcattagttctatcacaggagtgagggcatgggtgctaaggtccatgtcctaaaggagaagaatccggaccatcagctaaggtcccgaaatagatactaagttgaactaacgaagtcagattgctaagacagctaggatgttggcttggaagcagccattcatttaaagagtgcgtaacagctcactagtcgaggagtttggcgtggataataatcgggcatcaagtatcttaccgaagctatgggatcattaatgatcggtaggggagcattccactccgcgtcgaaggtgaagcgtgagctttgctggagcgtgtggaaaagcaaatgtaggtataagtaacgataaagggggtgagaaaccccctcgccgaaagactaaggtttcctgatcaacgctaatcggatcagggttagtcgggtcctaaggctcagccgaacggtgaggccgatggcagaacaggttaatattcctgtactaccttaaggagtgacgtggagacggagtcgtgacaacgccgcggactgacggaatagtccgttgaagggtgtagatgttgattgtggcaggcaaatccaccacgagagtcgaacctgatagtataccaattccttcgggaaacggtaatagtgcgtgtaaacatactcccgagaaaatccgctaaacttaatccttgaggtacccgtaccgcaaacggacacacgtagtcgggttgaatatactaaggcgcttgagtgattcacggttaaggaactaggcaaattgaccctgtaacttcgggataaagggtcccaacgagagttgggcgcagagaataggtccaggcaactgtttaacaaaaacacagggctgtgccaaattgaaagatcacgtatacagcctgacacctgcccggtgctggaaggttaagaggagatgtcatcgcaagagaagcattgaattgaagccccagtaaacggcggccgtaactataacggtcctaaggtagcgaaattccttgtcgggtaagttccgacctgcacgaatggtgtaatgatctggacactgtctcaaccgtgagctcagtgaaattgtagtatcggtgaagatgccgattacccgcgatgggacgaaaagaccccgtgaacctttactatagcttaacattgaatttgggtaattgatgtgtaggataggccggagactttgaagcgcagacgccagtttgtgtggagtcgctgttgaaatacggccctttgattatttgagttctaacccgttgtaacggggacactgtttggtgggtagtttgactggggtggtcgcctccaaaagtgtaacggaggcttctaaaggtgccctcaggacgattggtaaccgtccgtagagtgtaatggcataagggcgcttgactgggagacatacaagtcgatcaggtaggaaactagagcatagtgatccggtgtttccgcatggaagggacatcgctcaaaggataaaaggtactccggggataacaggctgatccctcccaagagctcatatcgacggaggggtttggcacctcgatgtcggctcgtcacatcctggggctggagaaggtcccaagggttgggctgttcgcccattaaagtggcacgcgagctgggttcagaacgtcgtgagacagttcggtctctatctatcgtgggcgtatgaaatttgcgtggctctgacactagtacgagaggaccgtgttggactgacctctggtttaccagttgtgccgccaggtgcattgctgggtatctaagtcgggattggataagtgctgaaagcatctaagtacgaagccagccacaagattagatttcttagggtcgtcaaagacgatgacgttgataggatgcaggtgtacaggtggtaacatcatagccgagcattactaattgcccgtccactttctttctgcgggacggttgttatatacgtttagcttgtcaaatgtctttcattttacttttcgtcatgtcataacctttttcaggtggttatagcacgagggttccacctcttcccattccgaacagagaagttaagcctcgtcacgccgatggtactgcgtaacagtgggagagtaggtagccgccgttttttatgaagcctcgcttgtctatttgacgggcgaggctttctgtttttaactgtttggaaaaacgacagcggattttaacgcttataaacctcataatacctattaaaaaagtgaatatttactgataatttgtatgttatgaggatatttatttgtatctttgtcgcccgaattgtaagctaacgatttaaaaaagagagaagctttgggaaaatttgataaatacaaaattgatctgaaaggaatgcagacagactctgctaagtatgagtttgtattggataacctttatttcgctcacattgatggtcctgaagttcaaaagggaaaagtaaatgtaactttgaacgtgaaaagaacctctcgcgctttcgaattgagctttcagaccgacggaatggtatgggtaccgtgtgatcgttgtctggatgatatggaactaccgatcagttcttctgataaactgatggtgaagtttggacatgaatatgcagaggaaggtgagaacctgattgtgattcccgaagaagaaggagaaatcaacgttgcatggttcatgtatgagtttatagcactctccatcccaatgaagcatgtacacgctccgggtaagtgcaataaagctatgactagtaaattgagcaagcatttgaagacaaatgcgaacgaggatagcgatgaagttttcgacactggaggagacgatatcgtaattgaagaggaagtggaggaacaaattgatcctcgctggaatgaattaaaaaaaatattagataataattaaagttttaagaaaatggcacatcctaagagaagacaatcgaaaacaagaacagcgaagagaagaactcacgataaggcagtagctcctacattggctatttgtccgaattgcggagaatggcatgtatatcacacagtgtgtggtgcttgcggatattacagaggtaagctcgctattgagaaagaagcagctgtataattagtacagttatactgaaaaacagcctgagggtgatgctctccggctgctttaagtattatagtattgctaatttaaaataggtttgatggaaaaaataaatgcagtaatcacaggagttggaggatatgtacccgattatatcttgactaatgacgagatatctaaaatggtagataccaacgatgaatggattatgactcgtatcggagtaaaggaaagacatattctgaatgaggaaggattaggtagctcatacatggctcgcaaggccgccaagcagttgatgaaaaagactggtgctaatcccgacgatattgatttggttgttgttgctactactactcctgattatcacttcccttctaccgcttctattctttgcgataaactcggactgaaaaatgcgtttgcttttgatctgcaggcggcttgtagtggtttcctgtatttgatggaaacggctgctaatttcattcgttcgggaagatataagaaaattatcattgtcggtgccgataagatgtcgtcaatggttaactatacagatcgtgctacatgtcctatctttggtgacggtgctgctgcttttatggtggaaccgactacggaagattacggtatcatggattcgatactaagaactgatggtaaaggattgcctttcctccacatgaaagctggtggttcggtttgtcctccgtcttatttcacggtagacaacaaaatgcactatctgcatcaggaaggaagaacagtgttcaagtatgctgtttccagtatgtcggacgtgtcggctgctattgcagaaaagaacggactgacgaaagacagcatcaactggattgtgccgcatcaggcaaatgtccggattatcgaggctgtggctcatcgcatggaagtgccgatggataaagtgctggtaaatatagaacactatggtaacacaagtgctgctactcttcctttatgtatatgggattttgaggataaactcaagaaaggtgataacattattttcactgcattcggcgccggatttacatggggagccgtttacgtgaagtggggttatgacggaaaaaaggaatcgtaacgtaagttactgaactataacactcaaaaacgcatcctatttcgattcgatgcgtttttttgtctcaaccaataaaatataaagagaaatgcataaagctggttttgtaaacatcgtaggaaatccgaatgttggaaagtcgacattgatgaatgctttggtaggtgagcgtatttcgattgctactttcaaggcgcagactactcgtcaccggattatggggatctataatacggatgagatgcagattgttttttctgatactccgggagtattgaagcctaactacaaattacaggaatcgatgctgaatttttctacttcagcactgacggatgcggatattttactttatgtgactgatgtggtagagacaccggataagaataatgagtttatggaaaaggtgcgtcaaatgacggtacctgtcctgctgctcataaacaaaattgacctcaccgatcaagaaaagctggttaagctggtggaggaatggaaggaattgcttccgcaagccgagattattcctatttctgccgcctccaagtttaatgtagattatgtgatgaagcggattaaggaattgctgcccgattctcctccttattttggaaaggatcagtggacggataagcctgcccgtttctttgtgaatgagattatccgcgaaaagattctattgtactacgacaaggagattccttattcggtggaagtagccgtagaggagtttaaggaagaagcgaagaaaatccatatccgggcagtgatctatgtggagcgtgattcgcagaaaggaatcattatcggcaaacagggaaaggcgctgaagaaagtggctactgaagcgcgtcgtgaactggaacgtttctttggaaagactatttatctggaaacgtatgtgaaggtggataaggattggcgtagttcggataaggaattacgtaattttggttatcagttagattaaaagtattcatgcgactgtgatagtcgtgaaaaacaaggtattgaactatgggtaatttagttgcaattgtaggacgccccaatgtgggcaagtctaccttatttaaccgtctgacgaagtcgcgtcgggctattgtgaatgaagaagcgggaacaacccgtgacaggcagtatggcaagtcggaatggctgggccgtgagttctctgtggtggataccggaggatgggtggtaaactcggacgatatctttgaagaagagatcagaaagcaggtgttgctggctgtggacgaggcggatgtgattctgtttgtggtggatgtgatgaatggagtgaccgacctggatatgcaggtggcgactatcctgcgtcgtgccaacagtccggtgattgtagttgccaacaagacagataataacgagttacaatataatgctccggaattctataaattgggattgggcgatccgtattgtatttctgcgattacaggaagtggtacgggtgatttaatggacttgattgtcggtaagttcaagaaggaatcctcggaaatcttggatgatgagatacctcgttttgcagtggtgggacgtccgaatgccggtaaatcttctattgtaaatgcatttatcggtgaagaccgtaacattgtgaccgagattgccggaacgactcgtgattctatctatacccgctacaataagttcggatttgatttttatctggtggataccgccggtatccgtaagaagaataaggtgaatgaggatttggaatactactctgtgatccgttcgattcgtgccattgaaggttcggatgtatgtattctgatgctggatgccacgagaggaatcgaaagtcaggatctgaatatcttctccctgattcaaaagaatcagaaaggattggttgtcgtgataaataaatgggatctggtggaggataaatctgtgaaagtgcagaaaacgtttgaagaagctgttcgttcacgttttgctccctttgtggattttccgattatatttgcttctgcattgaccaagcaacgtatcttgaaggtgcttgaagaagcccgtaatgtatatgagaatcgtacgacaaaaataccaaccgcacgtttgaatgaggaaatgcttccgttgattgaggcgtatcctcccccttcaaacaaaggtaagtatatcaagattaagtatattacgcagttgccgaatacacaagttccttcgtttgtttattttgccaacttgccgcagtacgtgaaggagccctacaagcgtttcctggaaaataagatgcgtgagaagtggaatctgacaggtaccccgattaatatttatattcgacagaaataaacaacaataaagaaaaacacccgaaaacattatgttttcgggtgtttttctttattgttagaggtgaatcttcagtcattcttatttctccaattggaaatctttacggcgcaatacaaagctgttacttaaatacttttcacgtacaatctgattctcagacagttcttccggtgtgccttggaacaaaatcttgccttcgaacaacaggtaggcacggtcggtaatactcaatgtttcctgcacattgtggtcggtaatcaggataccgatatttctgtccttcaacttccatacaatttgctggatatcttctacggcgatcgggtcgacaccggcaaaaggttcgtcgagcatgatgaatttcgggtcgatagcaaggcaacgggcgatttccgtgcggcggcgttcacctccggatagttggttacctttgtttttgcgtactttttgaaggcgaaattctgcaatcaggctttcaagtttttccttctgatattctttaggtttgttagtcatttccagaacggaagcgatattatcttccacactcatctgacggaatacggaagcctcttgagcgaggtagccgataccggtttgtgcccgtttgtaaacaggatatttggtaatctccaaatcgtcgaggaaaatgcgtccttcgttgggggtaatcaaccccacggtcatatagaatgaagtcgtcttaccggcaccgttcggccccagcaaacccacaatctcaccttgcttcacatcaatggaaacatggcttacaacggttcgtttaccgtacttcttaaccaagtcttccgtgcggagcaccatcttgctttcttccatattctagttattttgcggcaaatgtagtaaaaataagccgaaataatgtacatttgcagacaaatagtgtgagttatgataaaagcattgagaaccgtcggaagatatttcatgctgatgggacggactttttcccgcccggaacgtatgcggatgtttttccgacaataccttaacgagttggagcagctaggtgtgaactccatcggaatcgtgttgttgatttcgtttttcatcggcgcggttattaccattcagattaagttgaatattgaaagtccgtggatgccccgctggacggtgggatatgtgacccgcgaaattatgttactggagttttcttcttctattatgtgtctgattcttgcggggaaagtggggtcgaatattgcttcggagttgggaacgatgcgggtgacgcagcagattgatgcgcttgaaattatgggagttaattctgccaactatctgatactgcctaagattgcggctatggtgaccgtgattcctatattggtgacattcagtatctttgccggtataataggggccttttgtacttgttggtttgccggagtcatgaatgctgtcgatcttgaatatggtttgcagtatatgtttaatgaatggtttatctgggcaggtattatcaaatctcttttctttgcctttattattgcaagtgtatccgcctttttcggatatacggtggaaggcggttctattgctgtgggaaaggcttccacggattccgtagtgtccagtagtgttttgattctgtttgcggatttgatattaactaaacttttgatgggatgattgaggttaaaggactttataaatcgtttgacgataagacggtattgagtgatatcaatgcgacctttgagaatgggaagacaaaccttattatcggtcagagtggttccggcaagacggtattgatgaaatgtatcgtggggctgcttactccggagaagggtgaagttctgtatgacggtcgaaatctcgtgatgatggggaagaaggagaagaagatgcttcgtaaggaaatgggaatgattttccagagtgccgcacttttcgattccttgtcggtgttggataatgtgatgttccctttgaatatgttcagtaatgacaccttacgcgaacgtactaagcgggccatgttctgcttggaccgtgtcaacctgaccgaggcaaaagataagtttcccggagaaatcagtggcggtatgcagaaacgtgtagctattgctcgtgctattgctttgaatccgcaatacctgttctgtgacgagccgaactcgggactagacccgaaaacttcgttagtgattgacgatctgattcacgatattacccaggaatataacatgactaccattattaatacacatgatatgaattctgtattgggaatcggtgaaaaggtgatttatatttatgaaggacataaagaatgggaaggaactaaagacgatatattcacttctaccaacgaacgtctgaataactttatctttgcttcggatttacttcgcaaggtgaaagaccttgaagtacaaagtatggagggctgagaccggatatagttggaaattaggctataaaaaaacttctgtcatcgagtggcagaagtttctttttttcttagctatattagcgtcggcaattaagctctaggtctagcttctttaactaccatggtacggcccatgtactcggctccgttcaattctgcaatagccttggcagcggcagcatcgtcttccatttcgatgaaagcgaatcctttggatctaccggtttcacggtccataacaactttaactgatgatactgctccgtaatcttccatcacttgttgcagatctccttccttaacgcggtagttaaggtttccaacataaatgttcataatgaaaatgataaaaaataaataaatgaataaaactctctggatagatggttactaataaaaggattaaaacgacagagagtttacaaaagcgttttttcaacggaagtaaaaaccttgtaatagaaatcgagaaactaatggtccatcaatccgcagcaaagaaaagaataatttttggattgaccatctttttagagattttatttgcagaaagacaaaaaaaagtaaaacggagaactgtacagcgtgttctttcacaaggatttttcatttgtttatatgttacattactgaaataaatctgcaatgtcttttgaaatttgaaagattagcactaattttgcaccctctttgagtatagaacaaagtataaatcaaataaataattgtcagaatgaacgtttcattacaaaacattgacaaagtaagcgcagagcttactgtaaagcttgagaaagccgattatcaggagaaagtagacaaagagttgaaatcactccgtcagaaggcacagatcccgggattccgtaaaggtatggttcctacaagtcttattaaaaagatgtatggtaagtcggtgattgcagaggtagtgaataagacgctgcaagaagctgtttacaattatattaaagaaaataaggtgaatatgttgggcgaaccgttgcctaacgaagaaaaacagcagaatatcgacttcgatacaatggatgaatttgatttcgtgttcgatattgctttggcacccgaatttaaagcggaagtaagcactaaagataaagtcgattattatacgattgaggtatctgacgagatgatcgacaatcaggtgaagatgtatactcaacgcaccggcaaatacgataaagtagatgcttacgaagataatgatatgctgaaaggcctgttggctcagttggacgaagaaggtaacacgaaagaaggcggtattcaggtagaaggtgctgttttgatgccttcttatatgaagaatgacgaccagaaagctatctttgctaatgcgaaggtaaacgatgtgctggtgttcaacccgaatgtggcttatgacggtcacgctgctgagttgggttctttattgaaaatcgataaggaaatcgctaaggatgttaagtctaactttagctttcaggtagaagaaatcactcgttttgttccgggcgaactgactcaggaagtgttcgatcaggcattcggtgagggcgttgtgaagactgaagaagaattccgcgctaagatcaaagaagaaattgctgcaagatttgttgcagacagcgattataagttcttgattgatgttcgcaaggtattgatggataaagtaggtaaactggaattcccggatgcactgctgaaacgtattatgttgctgaacaacgaagaaaagggcgaagaatatgttgctgaaaactatgataagagtattgaagaactgacttggcacctgattaaagaacagctggtagaagcaaacaatatcaaggtagaacaggaagatgtgctgaaaatggcaagagatacaacaaaggcacagtttgctcaatatggtatgctttctattcctgatgatgtacttgacaactatgcacaggaaatgttgaagaagaaagaaactatcaacaatctggtgagtcgtgttgtagaagtgaagttggctgctgccttgaaggcacaggttactttggagaacaagaacgtttctatcgaggaattcaataagatgtttgaataaacgttcggctgaacagaatataaagtcacagaaacacagagtttttataaaattataactctgtgtttttttgtgtctctgtattctttttcgtttctttgtacttacgtttatttttaattaataagaaaggaacaataacatggatgattttagaaaatacgcaaccaagcatttaggaatgaatggcatggttttggacgatgtgattaaatcgcaagccgggtatttgaatccttatattctggaagaaagacagttgaatgtaactcagctcgacgtattctcccgcttgatgatggaccgcattattttcctcggtacacaggtggacgattatactgctaatacgcttcaggcacagttgctgtatttggactctgttgatccgggcaaggatatttctatttatatcaactctccgggcggaagtgtgtacgccggactgggcatttacgatacgatgcagtttatctcgagtgatgtggctacgatttgtacaggtatggcggcttctatggcagctgtattgctggttgccggtaaagaaggcaagcgttctgcactgcctcactcgcgtgtcatgattcaccagccgatgggaggcgcacagggacaggcctcggatattgaaattactgcccgtgaaattcaaaaattgaagaaagaactttatacgattatcgccgatcattcgcatactgattttgataaggtatgggcggactctgaccgtgactactggatgacagcacaggaagcgaaagagtacggcatgattgatgaagtattgattaagaaataaaaatggctgattcaaaagcaaagaaaaagtgtagcttctgcggtcggtcggagaatgaagttggattcctgattacgggagtaaacggttatatctgcgacagttgtgccacccaagcttatgagattactcaggaagcgttgggcgaagtcaagaaaagcgccggagctaccaaacttaatttaaatgaactacccaaaccggtagagatcaagaaattccttgaccagtatgtaataggacaggatgacgccaagcgttttctttccgtatcggtctataaccattataaacgtttgctccaaaaggatagtggagatgatgtggaaattgaaaaatcgaacatcattatggtgggtagcaccggaaccggaaaaacattgctggctcgtacgattgccaagttgctccatgttccgtttacaattgtggatgctacggtactgacggaagccggttatgtgggagaggatattgaaagtattctaacccgtctgcttcaggtggctgattataatgtaccggaagctgaacagggaattgtatttattgatgagatcgacaagatcgcccgcaaaggagataatccctctatcactcgtgacgtgagcggtgaaggtgtacaacagggattactgaaactgctcgaaggttccgtggtgaatgtgcccccacagggaggccgtaagcaccccgaccaaaagatgattccggtaaataccaagaatatcctctttatttgtggcggtgctttcgatggtattgaaaagaaaatcgcacaacgactgaatacgcatgttgtaggctatacagcttcgcagacaacagcgaggattgataagaataacatgatgcagtatattgctccccaggatttgaagtcattcggactgattcccgaaataatcggtcgtctgccagtattgacttacctcaatcctctggatcgtgatgcgcttcgtgctatccttaccgaacccaaaaactctatcatcaaacagtatgttaaactgcttgagatggatggtatcaagttgacatttgaagattctgtctttgaatatattgtcgataaggcggttgaatataagcttggtgcccgtggattgcgttccattgtggaaacgattatgatggatgtcatgtttgaaatcccttcgggaagcaaaaaagagtatgaagtgacgctggattacgcgaagcagcaactggaaaaagcaaacatggcaaggctgcaaaccgcttaaaatcaaaaagtaaggcgactgtaaatgaaggcttctgttttttcttgaaaatattagtcgtattttgcttggtaattacgaagttgtttataactttgtttggttctcttgaaaaagagtgctttgcttaaagttaaaccatgaactgaataaaacaacctaagttaagatggcagggaagattaatttaataaatgaactgaagaagtgtttcggatttaataaattcaagggaaaccaggaagcaatcattcagaacttgcttgatggtagagacacctttgtactgatgcctaccggtggcgggaaatccttatgctatcagttaccttcgctcttgatggaaggaacggcaattgtaatttctccgcttattgcgttgatgaagaaccaagtggatgcaatgcgtaattttagtgaagaagatggtatcgcccattttattaattcttcattaaacaaaggcgcgatagaccaagtgaagtctgacatccttgccggaaagacaaaattgttatatgtggctccggagtctttgacaaaggaagagaatgtagattttttgcgctcggtgaaaatttcgttttacgcggtagacgaggctcactgtatttccgaatgggggcatgacttccggccggaatatcggcggattcgtcctatcatcaacgagatcggaaaggctccgttgatagcacttactgcaacggcaacgccaaaggtgcagcacgatatccagaagaatctgggaatggtggatgcacaggttttcaagtcatcgttcaaccgtccgaacctgtattatgaggtacgcgcgaagactgctaatattgaccgtgatattatcaagtttatcaagaataatccggaaaaatcgggtatcgtttactgccttagccggaagagagtagaagaacttgctgaaattcttcaggcaaacggtatcaacgcgcgtccttaccatgcgggtatggactcattgacgaggacgaagaatcaggatgatttcctgatggaaaaagtggaagtcattgtggctacgatcgctttcggtatggggattgataaaccggatgtgcggtttgtgattcactacgatatcccgaaaagcttggaaggatattaccaggaaacggggcgcgccggtagagatggcggtgaaggtcagtgcataaccttttatacaaacaaagacttgcagaaactggaaaagttcatgcaagggaaacctgtggcagaacaggaaattggcaagcagcttctgttggaaaccgctgcttatgccgaatcttccgtatgccgacgtaagacattactacattatttcggtgaagagtacacggaagaaaattgtggaaattgtgacaactgtttaaaccctaaaaaacaagtggaggctcaagaattattgtgtgccgtgattgaagcgattatcgcggtgaaagaaaactttaaggcagattatatcattgacatattacaaggtagagagacttcggaggtacaggctcatttgcatgaggacctcgaagtatttggctcaggtatgggcgaagaagacaaaacatggaatgcagtaatccgtcaggctctgatagcaggctatttgagcaaagatgtagaacattacggtcttttgaaagtgacggaagaaggacacaagttcttgaagaaacctaaatcattcaagataacggaggataatgactttgaagaagtggaggaggaagtaccggcacgcggcggtggctcttgtgcagtagaccctgctctttattcaatgttgaaagacttgaggaagaagctctctaagaaactggaagttcctccttatgtaattttccaggacccgtctttggaagcaatggctactatctacccggtaacactggaagagctacagaatattcccggtgtaggtgccggaaaggcgaaacgctacggtgaagaattctgtaaactgattaaacgtcactgtgaagagaatgaaatagaacgtcccgaagacttgcgtgtacgtacggttgctaataagtcgaaaatgaaagtgtctatcattcaggctattgaccgtaaggtagccttagatgatattgctctatccaaaggtattgaatttggagaactgttggatgaagtagaagcaattgtctattccggaaccaaactgaatattgattacttcttggaagagatcatggatgaagatcatttgcttgacatctacgattattttaaggagtctacgacagacaagattgatgatgcacttgatgaactgggggatgacttcactgaagaagaagttcgtttggtacgtattaagttcatctctgaaatggcaaactaaaaaaagcgaaaaaaataggcgtgcaggtatgcggttttgaataaaaaccgtatatttgcacgcaataatttttaaacgcatagccctatgtcatttattgctgataagattgtaatggatgggttgacttacgatgacgtactgttgatccccgcttattctgaagttttaccgcgcactgtcgatctctcgacaaagttttcaaaaaacattgagttaaaaataccttttgtgacggctgccatggatacggtaaccgaagcgaaaatggctattgccattgctcgtgaaggtggtatcggtgtgattcacaaaaatatgtctatcgaagaacaagcaagacaagttgctattgtaaagcgtgccgagaatggtatgatttatgatcctgtgactatcaagagaggttctaccgttcgtgatgctttggatattatggctgaatataaaatcggtggtatccctgttgtggatgatgaaggttatctggtaggtattgttactaacagagacttgcgttttgaaagagatatggcaaaacatattgatcttgtcatgactcctaaagaaagattagtaactaccaaccagtctactgacttggaatctgctgcacagattcttcagaaacataagattgagaaacttccgattgtaggaatggacggaaagttgatcggtcttgttacttataaggatattacaaaagcaaaagacaaaccgatggcttgtaaagacgccaaaggtcgtttgcgtgttgccgccggtgtgggggtgactgtcgatacattggatcgtatgcaggctttggttgatgcgggtgcggatgccattgttattgatacggctcacggacactctgcattcgttattgagaaactgagagaagctaagaaacgcttcccgggcattgatattgttgtaggtaatattgctaccggagaagctgctaaggccttggtggaagctggtgctgatgctgtgaaagtaggtatcggaccgggatctatctgtacgacccgtgtggttgccggtgtgggggttccccagctgtcggctgtatatgatgtagcaaaagcgctgaaaggtacaggtattcctttgattgccgatggtggtttgcgctattccggtgatgtcgtgaaagcattggctgccggtgggtatagtgtaatgatcggatcattggttgccggaacagaagaatctccgggtgatactattatcttcaacggacgtaaattcaaatcatatcgtggcatggggtcgttggaagctatggagaatggttcaaaagaccgttacttccaaagtggaacagctgacgtgaagaaattggttccggaaggtattgctgcccgtgttccttataagggtacattgttcgaagttgtttatcaattaacaggtggtttgcgtgcaggtatgggatattgtggtgctgccaatattgaaaaacttcacgatgccaaatttacccgtatcacaaatgccggtgtaatggaaagtcatccgcacgatgtgacgattaccagtgaatcgcctaattatagccgtccggaataacagcatatataaacggtgaactattaacggtgaacggtgaacagactgtgtcgatctgcagggtgttcgctgctcaccgttcgttgtttatggagttaatgtttggtttttagagtttggaaaataagaattgatgatgaaaagaggtctgcttgtagcttggttttggtttttcggtatctcggtctttgcacaggaagacccggtgctgatgcgggtgaatggaaaagatatacttcgttcggagtttgagtattcgtatcggcatcggactggtaatgcagatgcaaaactctctccgaaggaatatgcggaacttttcgctcaatcgaaattgaaggttgaagcggccaaagttgcaggacttgatacgactactatgttccgaaaactacaggaagcgtggcgaagtcagttgctcaaatcttatttgacggataagcaggtattggatagttgtattcgtgttctgtatcaggatagaggtttgaaaggattggggagtcgggtacggataatgcaaattttcaaatatctgcctcagacaataactgccaagcatttggaggaagagaaaaaccgaatagattctatctggcagtcgctaaggactcagtcagatttggattttgcccgtttggtggaaatgtactcggaggataagcgtagtatgtggttggaacgtttgcaaacaacgagcgaatttgaaaatgtagctttttctttgtcaacaggagaaatatcccatcctttctttactccggaagggcttcatattataaaagtgattgaccggaaagaaaatccttcgtatggagaggtttatgagaagttggcagaacgtttgatacgtaaggagggggtggataaagctacggaaaccatagtggaacgactaaaaagagactggcaatatgctcccaatccgagtggcatgaacgagttgttgacaattggcagaacggagcagactttgtttacaatcgatggacaggtatattcgggagagatgttcaagcagtttgcttcttcgcatccgcaggcggtgaagcggcaactgaatggatttatagcaaagtcgttattggactatgaaggtaagaatatagagcggaaacatccggaagtccgctatgctttgcagaaagttactgataagtatctcatagcagaggtaactcgtcagaaagtggatttgcctgccataaatgaccgggcaggactagcaacttattttaaatttcacacttcggattatcgttgggatagtccgcgatataaaggtgctattcttcattgcgttgataaaaaaacgtcgaagcaggctaaaaaactattgaagaaaaccccggaaaaagaatgggcggaagtacttcggcaaacttttaatacatccggagaagaaaagataaaagttgaacagggaatttttgccgacggggataataaatatatagataaactggtttttaagaagggggattttgaacctctaatgtcttatccttttactgttgttgtcggcaaaaaacagaaaggcccggatgattatcgagaggtaatagaacaggtccggaaggattatcgaagctatcttaacgcattctggatgcgggaattgcaggatttcggtaaggttgaaataaaccaagaggttttaaaaaccgttaataataactgatgtaaccgattattcactatcttcgtaccttaaataagtagatttcaattgacaatgcgaatattagtcctcttactgattacccttcttggttgtggagcgtgcaaaaaacagcatgaccataaaggtaagactcctttggtagaggtggatggtaattttttatataaagaagatttgatgtccgtacttcctgttggattgtcaaaagatgatagcattcttttcgccgaacactatattcgtagttgggcggaggaaatcttgttgtatgaaaaagctgcgaacaacattcctgataatgtggatgtggaaaagttggtggagaactaccggaaagctttgattatgcatacttatcagcaggaactgattaatcagaagttgataaatgatattccggaacaggaaattgcagattattatgagaaaaacaaagaattgtttaagctggagaatccgttgattaagggattgtttatcaaagtgccgttaacggctccccagttgaataatgtccgcagatggtataagacagagaagcaggatgcagtagagagtctggaaaaatacagtttgcaaaatgcggtgaaatatgaatatttctatgacaaatgggtctccgtgacagatatactcgacatgattccgttaaaagtagatacaccggaagaatatgtaaacaaacaccgtcaggtagaattgaaagatacggcattttattatttcctgaatgtgagcgattatcgtggagtaggagaggaaaaaccgtatgagtttgcccgatcggaagtgaaagatttgctggtcaatcagaaacgggtgaattttatggagcaagtaaaaagcgacctgtatcagcaggcggtagacaagaagaagattatatataattattaaatacaaagaatgaagaagtttgtgaactttagatttgttgttacccttgtcctggcagtttttgctaacgtggtaacttatgcccaggacaacgtggttgatgaagtagtttgggtagtaggtgacgaagctattttaaaatcagatgtagaagaggctcgtatggacgccttgtataatggacgcagattcgacggcgatccatattgtgtgattcccgaagaaatcgctgttcagaagttattcctgcatcaggcaaagttggatagtattgaggtttccgaagcggaaatcatccagcgagtagatatgctgactaatatgtacattcagcagatcggttcaagagagaaaatggaggagtatttcaataagacttccgctcagattcgtgaaacactgcgtgataatgcacgagacggattgacagtacagaagatgcagcagaaattagtcggggaaatcaaagtaactccggcagaagtacgccgttacttcaaagaccttccgcaggatagtatcccttacattccgacgcaggtagaagtgcagattatcacgctgcaacctaaaattcctgttgcagaaatcgaagatgtgaagaaaaggctgcgcgactatacggatcgtgtgacaaaaggagaaatcgacttctcaacgttggcccgtttgtattccgaggataaggcatctgccataaaaggcggcgaatgcggattcatgggacgtggtatgatggacccttcttatgcgaatgtggcattcagtttgcaggatccgaagaaagtctccaagattgttgagtctgaattcggttatcatattatccagttgattgagaagcgtggtgaccgtgtcaatacccgtcacattctgttgcgtccgaaagtttcggaaaaagaactgacagaggcttgtgcacgtctggattctattgctgatgatatccgtgcaaataagttctcgttcgatgaagcagctgccgttatttcacatgataaagatactcgtaataatcatggtatcatggtgaatatcaatgaaaattcaggagtgactacttctaaattccaaatgcaggatctacctcaggatgttgccaaagtggtagacaagatgaacgttggagagatttccaaagcatttacaatgattaatgagaaagacggaaaggaagtttgtgcgattgtgaaactgaaggcaaaaattaacggtcataaagcgactattgcagaggactatcaggacttgaaagaaattgtaatggataaacgccgcgaagaaatgttgcacaagtggattctggataagcagaaacatacttatgtacgtatcaacgaaaactggcagaagtgtgacttcaagtatccgggttggattaagaaggattgatgtttaacagcttgactttatatgctgaaacaaaataaaaaagataaacaagacaggcatagatggctcctaataggctttctatgcctgtttggcgtatgtcttgtagcgcaggtgcgtcctacagagcaaaaaacgaaggcaaccggaacatctacaaaatcggttgcagacacatccaaaacaacgaagaagcagccggagaataagaaaacgaaggtttatttgctccatgctggtgaaggtcaggcggataagttagctcgtcctgatgtgcaagtgctgattggtaatgtgaaaatgcgtcacgatagcatgtatatgtattgtgatagtgcgttgatctttgagaaaaccaattcagttgaggctttcagtaatgtacgtatggagcagggagatacgctgttcatttacggtgattatctttactatgatggaatgactcagattgcgcagctccgtgaaaatgtaaagatgataaaccggaacacgacgctgctgacggatagtttgaactacgaccgtctttatgacctcggatattatttcgagggggggacgttgatggacgaggaaaatgtgttgacttccgattggggtgaatacagtccggctaccaaacaatccgtgttcaaccatgatgtgaagttggttaatccgaagtttgtgttgacttccgatacattaaggtataacacagaaaataagattgccgtaattctcggaccttcgaatatcgttagtgataataatcatatctattcggagcgtggattctataatacaatgaccgaacaagcggaactgttagaccgttccatattgacaaaccaagggaagaaattggtaggtgatagcttattttatgaccggttgtccggatatggtgaagcattcgacaatgtgaaaatgacagatacgatcaacaagaacatgttgacgggcgattactgtttctataacgaactgaccgactctgcttttgctaccaagcgtgccgtggccattgactattcgcagggtgacagtctttttatgcatggtgatactctgcaaatggtttcctataacttgaatacagattctctgtaccggttgatgaaagcttatcataaagtacgtatgtatcgtacggatgtgcagggagtatgcgattcactggtttataactcaaaagattcttgcatgactatgtatgttgaccctattctttggaatgaaggtcagcagttgcttggtgagcagatcaagatttatatgaatgacagtactatcgactgggcccacattatcaatcaggcgttgacggtagagatgaaagactccattcattataaccaagtgtccggtaaggagatgaaagcctattttgaaaatggggatatgcggcatatcgaagtgattggtaatgtgctgacggccttttatccggaagaaaaagacagcacgatgaccggattcaactgtctggaagggagcttgctccatctttatatgaaagacaagaagatggagaaaggattatttgtgggaaagtccaacggtacgatgtatcccatggatcagataccgcccgataagttacgtctgcctacattctcctggtttgattatgtgcgtccgctgaataaagaggatattttcaactggagaggcaagcgggaaggcgaaatgctgaaaccgacaactgaccggcggccaaagacaaataagcgaaacttaattaatatgaagtagtatgggaatgtttttcaattcgatgagaaaacctcgtggctttaatcatcaatacatttatgtagacgagcgaaaggagaagctcgctaaaatggaagagaaagcgaagcgcgatttgggaatgcttcctgaaaaagaatttaagccggaagatatccgtggcaagtttgttgaaggaacaacgcacctgaaacgccggaaggctagcgggcgtaaacctgtctctttcggaatcatattgattatcattgctttccttatctatctgtggcattatttggcaacgggaagctggagtttctaaaggaaagaatttattagtagtcgactacttaactgatttactgcttaacgaactatgagtgatataatacatttgttaccagattcggtagctaatcagattgctgccggtgaagtgatacaacgtccggcgtccgttatcaaggagctggtagaaaatgcgattgatgcagatgcgcagaatgtacatgtgttggtgactgacgcaggtaaaacctgtattcaggtgattgacgatggaaaaggaatgtccgaaacagatgcccgtctttctttcgaacgtcatgctacttcgaagattcgcgaagcggcggatttgtttgctttgcgtacaatggggtttcgtggggaagccttggcctctatcgcagcagtggcacaggtggagttaaaaacacgccccgagtcggaagaactgggaacgaaactggtgattgcaggctctaaggtagagagccaggaagcggtatcctgttccaagggaagtaacttctccataaagaatctattctttaacatccctgcccgtcgtaaattcctgaaagcaaactccaccgaattgagtaatatccttgccgaatttgaacgtatcgctctggttcatcccgaagtagctttctccctttacagcaatgactccgagcttttcaatcttccggtttctccgttgcgtcagcgcattatggctatttttggtaagaaactcaatcagcagttgctgaatatcgaggtgaatactaccatggtgaagatttccggatacgtagccaaaccggagacagcccgcaagaaaggtgcccatcagtatttctttgtcaacgggcgatatatgcggcatccttattttcataaagccgtaatggatgcatacgaacagttgattcctgtcggcgaacagatttcttacttcatttattttgaagtcgatccggctaatattgatgtgaatattcatccgacgaagaccgaaatcaagtttgagaatgaacaggcaatctggcaaatcctttcggcggcagtcaaagagtcgttgggtaagttcagcgccattccttccattgattttgatacggaagatatgcccgacattcctgcattcgaacaaaatctatcctctgcacctcccacggtacagtataattcggattataatccgttcaaggtttctacgggaggcggtggcggcggagcatacagccgttcaaaggtggattgggaagatctttatggcggtctgaccaaagccagtaagatgaataatccccagccggagccggaaatggattgggaggattcttcaatgggtggggaaagtgccgttatggaagaaagaacggaaactgtaatgtcggcggcctcttcgaccttatatgccagtgagcctgtaattgagaagggtaatcagcatttgcagtttaagggacggtttattctgacctccgtgaagtccggtttgatgttgatcgaccagcaccgggcgcatatccgtgtacttttcgaccggtatatggttcaaatccagcagaaacagggcgtatcacaaggtgttcttttcccggaaatattacagctgcccgcttcggaagctgccgtactgcaaagcattatggatgatttgtcggcagtaggtttcgatctgagcgatctgggtggaggcagctatgctatcaacggtattccttcaggcatcgaaggactgaatccggtggaattggtacgtaatatgctacatacagctatggaaaaagggaatgatgtcaaggaagaagtccagaatattctggctctgacactggcacgtgcggcggctatcgtctacggtcaggtactgagcaatgaggaaatggtaagccttgtagacagccttttcgcttgtccctcaccgaattacacgccggacgggaaaacggttttgacaacaatcaaggaggaagatatcgaacgcttattcaaataaaataaataaaatcatcttttcctaaaaccttttagtcttgttcgtgttatttaaatagttcaacaaagaaaaagatttaaataaccacttaactattaggtatatgaaaaagattctgatgttgctggcttttgccggcgttgcgtctgtcgcttctgcgcagcagacaatgactgtaactgaatacgaggttattcaggtgcaagataaatatcaagtaataacgaaccctttctggagtaactggttcttctccgtcggaggaggtgcacaggtgctgtatggcaacaatgaccatatcggtaaattcagagaccgtgttgctcctacatttaatgtgtctgtcggtaaatgggtgactccgggattcggattgcgtatgcagtacagcggtttgcaagctaaaggattcacgaccaacgaaactgccaattatgtagtgggcggtccgagagctgacggttcatacaaacaacggtgggactatatgaacctgcacggtgacttgatgattaacctgaatgcacttttcggcggttacaatccgaaccgtgtatatgaaatcatcccttatatcggtgccggttgggctcattcttattcacgtcctcataccaatgccgctactttcaatgcaggtatcatcaaccgcttccgcttgtcgaatgccgttgacttgaatctggaactgagtgcaacaggcttggaaggcaaatttgacggcgaacatggaggaagaccagactatgacggtattctgggtgctacgcttggtgtgacttactatttcccgacccgaggattccaacgtcctacgccacagattatctctgaaatcgaattgaatcagatgcgtgaccagatgaatgcaatggctgccgctaatatgcagttgcaacagcagttggctaatgcacagcagccggtagaggtagaagatactgaagaagtagtgattacagatcctaatatcgctccgcgtactgtattcttcaagattggttcggacagactgtctccacaagaagaaatgaacttatcatatcttgccaaccggattaaagaatttccgggtactacctatactattaacggatatgcagattctgcaacaggcactccggctttcaacgaaaagttgagcttgaaacgtgcacaggttgttaaagatttgctggtgaagaagtatggaatcccggctgataacttgaaagtcgctgccggtggtggtgtcgataagttcgggcaaccgattctgaaccgtgttgtattggtagaatctgaaaaataaaagaataacttgactataaaaagtcggtagtttcttcaactcccttcctgcgggaagggtggctgaaagctggggtggtaggtaaatacacaatgttggcaataatcaatttgtgtatttacttaccacttcttgtgtatttacctaccacctccccctgcgggtactcctccttcccgaaggaggagagttcggatactatcgactttcagttatcctcgattttgggatactgcggttttttagtcgctctcttttgttgttctcctttcggctccacgcttaatgctgctggcggacaaggatattttttagttttcctttgaatccgttgcgtgaatcacctatttgttgcagcgggaagatcagtgtttcctgataagtcatgtgttccatgcggtcgtattccttccggtaaacttgcatggtgcgtccttcgagccgttcctgcaatgcaccgtttatataaagtgaagtacctttgtagtcaccttcgatgcggatcgtagtccattgatcggccggcaggcggtaggaattgaaaacaaaggtgtaaccgtcgcgggagaaagcgattcggcgggtattctcccagttggtgtatactaccgagtgcggaccttggaagagaatgctgctgataggattcgtcttctccggacagagctggaactccacactataaggataacccacttcctgcaaaggagtactgacggcctctttcccattaaaagaaagttcttttcctgcttcggtcagtgcggtttctgccgggactttgcccaacaggttaattcccggagcttcgggagttgttttgcacagctttgcaaatgcttcgtaggtgacattcttgttttcccctttccacagcttctcggcgagcacctgcatggcggggaaactgcgcaagtgtacgtcctgttcggatatcccgtttccacacttgtcattccacacggcaaacataccgcccaatacgccgggagtaccttcgggaagtgtctgtttcctgttcattatccacggcgaccatttctcataaatccactggtgatcgaggaaatcccggtagtaacctgctgccggaacgatatagagataagtgtcacaagtattaatcaacttgtacccctcttgcagggaaacaacaggatccacccagtcatacgaccacgcgttgaccgtgacaccttccgcttttacgggagtcttgccgggaagccatttcagtccgccccacatacgtacatttttgccgtatttctcaacaaatttcagataacggtctgtgaagtagcggtattgttcggcttctttcttgttgtattcgtcggtaccgatgtgcaggtctccgataaatacgggattgtcgcccgacagatattcgtccagcaggctgtcgacgaattgataagtttcttttttgtaaaggtccagatgatccatgccatacttccgacttgctatttcgggtttgtagtgggcgaaggcgagtgagtgggcgggaatatcaatttcgggaatgatacgcacaccgtattccaatcccatacgttgcaagtcgataaattcctgtttgctgtatgaaccgtctttggctgtcagtcccggaaagcgttcgctttccagtcggaatgcggcgtaggtgcggttccagtcatcgccgaagaactgcggaaaaccgttgtcgttcaagtgaatctgaaattcgttcatcttgtagaaggaaagtatctttacgtattgtttcagataatccattgtaaagaatttgcgggccacatccagcataaagccgcggttcgggaaaagcggataatcccgtgccgtccctttggggagctttccttgttcgttgtggagtatctgcaatagggtacgtgttccccagaatacgccctgaccggtgggggcggcgataccggcatagcggtttacggttaacgtatatccttcttcaccaagttccttgtccggtttcgacagtgagaggcagatgtctttcccggctggttttccggttttgatgacatagttccagccaaacagttcttttaagtcttgcgccagaatttgtgcggtaggcgagagcgtcgcttcatccgcaggtgagagcacgattgaaccttcggcgggcagagccagttcgccttttcctcctttccattgttgaagggcagggatcacttgcgggcagggctcttgggcggtggcaaacacgcataccattaacaggcagcatacgatgatgagggggcttttcataattaataagtctgtattaagattaataaatttctatgtttataaagtgggagcaggcgtcagccgctttctgcgtaaccgcctgtcgcaatcccattatttcaccggctgataatctgcgggctttccgtaaaatcccggcgccggtacgtatatcggctgactaggtatgccgatgttcagcaacttgccttccgtgcggaggcggcggatgtgaatcatggctgttgagcgaaccatacccgttatatcttgaaaatccgaacgttgcatgatctgatgatcggtgaaatattttctcaaccggctgtcgatatccgtctccgaaagtttgggagagtggataattcttttcatctgtttgattttccttaattccgcaacactattacaaatataactttttaagtacctgagcaacaaaaagttgctcaggaatttgccatgtcagatttttcacctatcttagtgttgcaaatcaaaatatgtatcaaacccgacagacatggcaaaggtagcaattaaatccgagaaactcactccttttggaggaatattttcaataatggagcaatttgactccagactctcatctgtaatcgactcaaccctcggtatgagatgcaggctgtatggttatcaatacagcgaaatcatccgttcgcttatgagcgtttatttttgtggcggctcatgcatcgaggatgtcaccactcatctgatgtaccacctttcgcttcatccgacacttcgcacatgcagtgccgacacgattcttagagccataaaggaactgacccaggataacatttcctacacatccgacactggcaagacctacgacttcaacacggcagacaagctgaatacactgctcctcaattgcctattgtccacagggcagctgaaagagggcgaggggtatgacgttgacttcgaccaccagttcatagaggctgagaagtttgatgcgaagcctacatacaagaagttccttggttatcgccctggcgtggcggttattggcaacttgattgtcggcattgagaacagcgacggcaacacaaatgtccgtttccaccagaaggacacgctgaagaggttctttgaaaggtttgaacaaaacaagcttattatcaaccgtttcagagctgattgcggctcgtgttctgaagagatagtggaagagattgctaaacactgcaagaccttctatatccgtgctaaccgatgcagttcgctctacaatgacatctttgccctcagaggttggaagaaagtggaattgggcggcattgagtttgagctggcctccattctcatcgagaaatggaaagggaaggcataccgtcttgtgattcaaagacagaagcggatagacggcgaactcgacctgtgggaaggagaatacacctaccgctgcatccttacaaatgactacgagtcttccgagaaagagattgtcgaattctataacctccgtggagggaaggaacgcatcttcgatgatatgaataacggattcggctggaacaggcttccaaaatcctttatgggagaaaacacggtgtttcttctgcttatggcactcatacgcaacttctataaattcatcatggcgaggcttgacgtgaagaggttcggactcaaagcaacaagccgcatcaagacgtttgtctttaagttcatctctgtgccagccaaatgggtcaggacatcaaggaagtatgtgctgaatatctattcatgcaacaatgcttatgccaatgtgttccagaatgactttggataacaccgacaacttatagtcgtgattttgcgtattgcctcaagtcgcatggtggggtaaggggcatttatatgtctttatggtgacattcgatgcactgtgccccctttttactaacgatgcagattcttttcgcttctgtatcatattaggcgcgtagttgcggatttgaggatttttatatggccgacggagtttttcagtttttggtctgaacggaactgtatgcctttcaactttactttcgtattccggcggggagtatcggcggcgatttcttcggtggcggttagtgtcggataaaaataaccgataccgtccaggtgcacttgccttccttcgcacagttcttcacccataacttgtgatagtgcgtctagcactgccgttacatccacctcgttcagcgtacaccgggattggatcctgctgcggaggtctttcgtgtctatctgtccgttggcgatgatgcgcggatgaaatcttttctcctctggtttgtccggtgataccggattctcgtaccagtcaaatgatatggccatagttccttttgtttatataagtagttctgattcgtatttcctatacttccttccgattaatccggcttcatcttcatcggctaatttctattggcctgtcggctaacctttattggctgacaggctgacagtgactagcgtaacagctagcataggttagctgttattgttccttatggcaaagttactacataaaggcttgctaacctaattttaaaggctttatttcggacgcgtcattggtgaacggaaagctgtcggtgggtagagaggaaataaacaaaggttcgcaaacctgtgtgctaccggtttgcgaaccttcgattatcggtttcgggtattgccaatacaggcattcccgttatgtgagtacttctttagctgaatattggcagagatacttttagattaggatatctgtcgcccagttgtttaaggaaatcgttgccgatcacgatagcttgtaccgtttcctgcgggtcggtagggatttccggtatattggtaaagatcaggcaggagtagatgatgagctcgataggcttgtcatcggtctgcaaagacagtttgtatgcttttacattgtttccccgggcttgggcctgtgcttttacttgtccttccattgggatttcggtaagtctggagttttcgaggcgggattggttgaatacaagatgccggtcgatttccccttctgtgtccgtatcgaataaatgaaggctgtttccgctgagaacaaggtatttgggagtttgcacggtgttgaaacgcacggttcccaaggtagccattcctttcagtttatctttaaccccgtctttaagggcggatcccacgccatattcggtgctggcataattgaaagcgtcaatcttttcttgcttcatttcttcttggaggaaaggcaattcggaagtgagtacgctgtttttatatcgttcggcatttgcaaattccgctttgaaatcagtattgtttaccacttgtgcttgttgcgagtttttgttctttacataataccagtaccctgcatagagaacgatgaaaataatcggaataagtgtgtaaattgacatagcttatctgttttttaatgtgattaattaggtgtgttttatacttctacccggctctgttttctttttcttacttgggatgaatccccagatgataagggcaatgatgatcagtcctactatcttgccgccatatcgagagtagaaaccgactttattcagcttttcaccgtccagattattctctttcagaatggcggagagttgttcttccgtcagttcataataagtgtcttctttttcgcaatatcctacgaggcggggctcctgctcgatatagagaggaaggatgtaagcgatgttgaactcctgatgaatggtccccagatcaatgtagttgccgttgtctgtcttatattcttcggtgtcgggcaggtctgctactttgtttaagacttcacgatcaccgaaaggaatttttacaccacgcgcggataccgtttgacaagagaggaaaaggagagcgccgaatgcaaagaaaagggttagatgtttcatgtttttcttttttgagtttatgaataatggaattgttgattaatattgccgtaaaagtagagaaccttaattccgcaacactattacaaatataactttttaagtacctgagcaacaaaaagttgctcaggaatttgccatgtcagatttttcacctatcttagtgttgcaaatcaaaatatgtatcaaacccgacagacatggcaaaggtagcaattaaatccgagaaactcactccttttggaggaatattttcaataatggagcaatttgactccagactctcatctgtaatcgactcaaccctcggtatgagatgcaggctgtatggttatcaatacagcgaaatcatccgttcgcttatgagcgtttatttttgtggcggctcatgcatcgaggatgtcaccactcatctgatgtaccacctttcgcttcatccgacacttcgcacatgcagtgccgacacgattcttagagccataaaggaactgacccaggataacatttcctacacatccgacactggcaagacctacgacttcaacacggcagacaagctgaatacactgctcctcaattgcctattgtccacagggcagctgaaagagggcgaggggtatgacgttgacttcgaccaccagttcatagaggctgagaagtttgatgcgaagcctacatacaagaagttccttggttatcgccctggcgtggcggttattggcaacttgattgtcggcattgagaacagcgacggcaacacaaatgtccgtttccaccagaaggacacgctgaagaggttctttgaaaggtttgaacaaaacaagcttattatcaaccgtttcagagctgattgcggctcgtgttctgaagagatagtggaagagattgctaaacactgcaagaccttctatatccgtgctaaccgatgcagttcgctctacaatgacatctttgccctcagaggttggaagaaagtggaattgggcggcattgagtttgagctggcctccattctcatcgagaaatggaaagggaaggcataccgtcttgtgattcaaagacagaagcggatagacggcgaactcgacctgtgggaaggagaatacacctaccgctgcatccttacaaatgactacgagtcttccgagaaagagattgtcgaattctataacctccgtggagggaaggaacgcatcttcgatgatatgaataacggattcggctggaacaggcttccaaaatcctttatgggagaaaacacggtgtttcttctgcttatggcactcatacgcaacttctataaattcatcatggcgaggcttgacgtgaagaggttcggactcaaagcaacaagccgcatcaagacgtttgtctttaagttcatctctgtgccagccaaatgggtcaggacatcaaggaagtatgtgctgaatatctattcatgcaacaatgcttatgccaatgtgttccagaatgactttggataacaccgacaacttatagtcgtgattttgcgtattgcctcaagtcgcatggtggggtaaggggcatttatatgtctttatggtgacattcgatgcactgtgccccctttttactaacgatgcagattcttttcgcttctgtatcatattaggcgcgtagttgcggatttgagggagaaaagaaatagaaaaagcaaacgatcgtttgctttttgggaaaatgatttttctgtccggcttttttctgtttcagatacgttaaagatgaggggaaagaacgtaataagttcatgagcaggctttatttttattgaatacacacggcaaatctgatatttttatgtagatgttttatttcatctttttgcttccggtattctccatactccggtcggaagtggggaagttgagcagagcattggtctttgttatcattacaaattattctcggactgatactgctgatactttccttcctctatcagaagttgaaaggagtattctttaaaaatgatgaagccgaaacggactaatcttcgttgtacttataacaatgataaaggctgcctgctcttttatagaacggcagcctttacttattaattggcctatctgttgacgacttattcttgtgagaaacgttttacctgttcctcgatcaattccttgtcgtcaaagtagttaatcttcatagccttcttgacatctgccagtgtttcggcggcggcagctctggctacttcacatcctttttgcaacatctcgtaaacggcaggaatgtctttgctgaattctttgcgacggttacggataggttccagtgtctcttgcatgatagcgttcaggaaacgtttcactttcacgtctcccagtccaccgcgttggtagtgtgctttcagttctgcgagattcgggtaatccggcagataacgttcaaaatgttccggacggcagaatgcgtcgaggtatgtgaagacggtattaccttcaatctttcccggatcctgcacgcggaggtgtcccggatcggtatacatactcatgatcttcttctggatttcttccggttcttcggacagatagatacagttgccgagtgatttgctcatcttggctttaccgtcagtacccggcagacgcaggcaggcagcattgtccggcaacaggatttccggttccaccaatgtctcgccatagatatagttgaaacggcggactatttcgcgtgcctgttcgagcatcggttcctggtcttcgcctacggggacagtcgttgcacggaatgcagtgatgtccgcagcctgactgataggataagtgaagaagcctacgggaatgcttgcctcgaagttacgcatctggatttccgatttcacggtcgggttacgttgcaggcgggatacgcttacaaggtccatatagtagaagctaagttcgcatagctccggtatctgcgactggatgaagatagtagctttggaagggtcgattccgcatgccagatagtcaagagcaacctcgataacattctgacgtaccttctccgggttgtctatattgtctgtcaatgcctgcgaatcggcaatgaagataaacatcttactataatcacccgcgtcctgcaggtcaactctgcgtttcagtgaacctacatagtgcccgatatggagtcttccggtaggacggtcaccagtaagtatgattttctcttttcccattgttattaccttattataatagattgagcggcaaagatacagataaaaactgaaagatgtatcaaaatgggggcacttcactgtaaaaaagtgaacgtttctttttgtcatgtgcaaaatatgtcgttactttgcacaaattttaaaaccgacaatgaatcaacaggaaatcagaagcaagtattatctccattcggatgtttttcacccggaaacggcaggcttcttctcttttctccaaaaacgatattttagttctttggtaatgcgttaatccttttttgagggtaacgcattttttttatggatgaacttagaaacaacaacttattataacaacaaaagaaatggaaaaggaaatcaagaaagttctcgttttgggttctggagcactcaaaatcggacaagccggagaatttgactactcaggctcacaagcactgaaagctttgaaagaagaaggcatcagctcagtattggtaaacccgaacatcgcaaccattcagacttctgaaggaattgcagataaagtgtatttccttcccgtaactacttattttgtagaagaaattatcaagaaagaacgccccgacggtatcctgctggcattcggcggacagactgcactgaactgcggtgctgagctttacacacaaggtattcttgataaatacggagtgaaagtactcggtacatcggtagaggctatcatgtacacagaagaccgcgacctgttcgtgaagaagctggacgagatcaatatgaagactccggtaagccaggcggtagaaagcatggaagacgcgattgctgctgcacgtaagatcggttatccggtaatggtacgttcggcttatgcattgggtgggcttggtagcggtatctgcgccaacgaagaagaattcctgaaactggccgaaagttctttcgcgttctccaaacaaatcctggtggaagaatccctgaaaggctggaaagaaatcgaatttgaagttatccgcgacgccaacgaccactgtttcacagttgccagcatggaaaacttcgacccgctgggtatccacaccggtgaatctatcgttgtagctcctacttgctctctcgacgataaagaactgaaactgttgcaggaattgtctacaaaatgtatccgtcacttgggcattgtaggtgaatgtaatatccagtatgcgttcaactcagatacggatgattaccgtgtgatcgaagtgaacgctcgtctgagccgttcttccgcattggcttccaaggctaccggttatccgctggcattcgttgccgctaagatcgcgttgggttattcactcgaccagatcggcgaaatgggtactccgaattctgcctatgttgctccgcaactcgactactatatctgtaagattcctcgttgggacttgacgaagtttgccggtgtttcccgcgaaatcggttcaagcatgaagtcggtaggtgaaatcatgtctatcggtcgctctttcgaggaaatcatccaaaaaggtcttcgtatgatcggacaaggcatgcacggctttgtaggaaatgacgaactgcattttgacgaccttgataaagaactttcccgcccgactgacttgcgtgtgttctctatcgcacaggctttggaagaaggatatacgattgaccgtatccatgaactgacaaagatcgatccttggttcctcggcaaactgaagaacatcgttgactacaaagctaaattgtctacatataataaggtggaagatattccggctgacgtaatgcgtgaagctaaaatcttaggcttctctgacttccagattgcacgtttcgtactgaacccgactggaaacatggagaaagaaaacttggctgtacgtgctcatcgtaaagctatggggattcttccggcagtaaaacgcatcaatacgattgcttccgaacatccggaactgactaactatctgtatatgacgtatgcagtggaaggttatgatgtgaactattataagaatgaaaaatcagtagtcgtgctgggctcgggtgcttaccgtatcggtagctctgttgaatttgactggtgttcggtgaatgcggttcagactgcccgcaaactgggatacaagtctatcatgattaactacaaccctgaaacggtttctactgactatgatatgtgcgaccgcctgtacttcgacgaactttcgttcgaacgtgtgctcgatgtgatcgatctcgaacaacctcgcggtgtgattgtgtcggtaggcggacagattccgaacaacttggctatgaaactttatcgtcagtcggttcctgtactgggtacttcgccgatctctatcgaccgtgccgaaaaccgtaacaagttctctgcaatgcttgaccaactgggtatcgaccagccggcttggcaggagctgaccagtctcgaagatgtgaaaggctttgtggaaaaagtaggttatccggtgctggttcgtccttcttacgttctttcgggtgcggcaatgaatgtttgctatgatgatgaagaattggaaaacttcctgaaaatggctgccgaagtatctaaagaatatccggtagttgtttcacagttcctcgagaatacaaaagaaattgagttcgacgctgtggcacagaacggtgaggtggtagaatatgccatctctgaacacgtagaatttgcgggtgttcactccggtgatgctacactggtgttcccggcacagaagatatactttgcaactgcccgccgcatcaagaagatcagccgtcagattgctaaggaactcaatatctccggtccgttcaatatccagttcctggctcgtaataacgaggtgaaagtaattgaatgtaacttgcgtgcttctcgtagtttcccgttcgtatctaaagtactgaaacgtaactttatcgaaacggctacccgcatcatgcttgacgctccatactcgcgtcctgataaatcggcatttgatattgactggatcggtgtgaaagcatcgcagttctccttctcacgtctgcataaggccgatcctgtattaggcgtagatatgtcttctacgggtgaagtgggatgtatcggtgatgatttctccgaagcactgctgaactcaatgattgctaccggctttaagattcctgaaaaggcggtaatgttctcttcaggagcaatgaagtctaaagttgatttgttggatgcaagccgtatgttgtttgccaaaggatatcagatttatgctaccgctggtactgctgccttcttgaatgctcacggtgtagatacgactccggtttattggccagatgaaaaaccgggtgcggaaaacaatgtaatgaagatgattgccgatcacaagttcgacttgatcgttaacattccgaagaatcacagcaaacgtgagttgacgaatggttatcgtatccgtcgcggtgcgatcgatcataacattccgttgattacgaatgcccgtctggcaagtgcctttatcgaagcgttctgtgaattgaagctgagcgatattcagattaagagctggcaggaatacaaataagaactattataattcttaataagtgcccgctattgacagcctgttaatagcgggttttcttgttttattttttatctttgctacttcgtaattagtaacttgtaattagtagttgaaatatgcttgtgcttttatcttgtgccaagacaatgagtgatgtttcaaaggtgaaggttcctttgactacggttccccgttttcaaaaggaagcctctgagatagctttgcagatgtcgcagtttgctgtcggcgatctggaacgtttgttgcgtgtgaatgctaaaatagcagtagagaattataagcgttatcaggctttccatgcggaagaaactccggaattgtcggctttgttctcttatacgggaatcgtgttcaagcggttgaatccgaaagacttctctgcctcagaactcgaatatgcacaggaacatttgcgactgacatctttttgttacggtttgttgcgtccgctggatgtgattcgcccctatcgtctcgaaggagatgtggtattgccggagttgggtaatcagacgatgttttcttactggcggtcgcgcctgacggatacgtttatacaagacatcaaacaggcgggaggtattttatgcaatctggccagtgacgaaatgaaaagtttgtttgactggaaacgggtggagaaagaagtgcatgtcgtgactcctgaatttcatgtgtggaagaacgggaaactggctacggtggtaatatataccaagatgtctcgtggtgaaatgacgcgttttatcttgaaaaatagaatagagaatccggaagatttgaaagaattttcgtgggaaggcttcgagtttgatgaggctctttcggatgagaggcggtttgtatttattaatggtcagggaggataaagagtatgacggaagttgaaaagatgcgtaacggcctgttggcagatatgtcttcgccggagttgcaggtgcgttttgagcatgccaagaaattgttggctcgcatgcggggaatgagtacgtatgatgaagggtacaggaaattactggaagaactggtgccgaggattcctgaaacttcggttatttgtccgcctttctattgcgatcatggggacggaatcaagttaggcgagcatgtgtttgtcaatgctaactgcacatttctggacggcggatatatcacgattggtgctcatacgcttatcgggccttgtgtgcagatttacacaccgcatcatccgatggattatttggaaagaagaggctccaaggaatacgcttatccggtggcggttggtgaggactgctggattggtggcggagctattatatgtcccggtgtgacgattggtgatcgttgtgtgataggagcgggaagtgtcgtgacgaaagatattcctgatgatagtatcgcagtcgggaatccggcgcgtgtaatccgacgtagggactgaaaaaaataattatagtttgtgggctgataatcagtaacttaacggagttgtatataaaaagtttgaaaaataattcgataaatgtttgcagatttcaaaaaatgccgtacctttgcatcgcttttgaaacggaagtgtaagggcgtttagctcagctggttcagagcatctgccttacaagcagagggtcggcggttcgaatccgtcaacgcccacacaaaaacgaaacacttccggctcattaacaagggcgtttagctcagctggttcagagcatctgccttacaagcagagggtcggcggttcgaatccgtcaacgcccactaccaaaaggaaagtcttatgaagaaattcgtgagactttttttatttcttacctcttttatacaaactttctttgtccttttgccttataactcaggaaaaagagttaattttgcagtctgataattatctaagaaaacgtatggaacttgatgtattaacggccatatctccgattgatggtcgatatagaggcaaaactaaagctttggcagcttatttctctgaatttgcactgattaaataccgtgtacaggtagaggtggaatactttatcaccttgtgcgaactccctttgccgcaattaaaaggaatcgataacagcgtgtttgaaactctgcgtaatatttaccgtaacttttcggaagcagatgcacagcgtattaaagatatcgaaagtgtaaccaatcatgatgtgaaggccgtagaatacttcctgaaagaagaatttgacaaaatgggggggatggatgactataaggaattcattcacttcggactgacttctcaggatataaacaatacgtctgttcctctttctatcaaggaagcgctcgataaagtgtattatccgttgattgaagaactgattgcacagttaaaaacttatgcaacagattgggctgatattccgatgcttgccaaaactcacggtcagccggcttctcctacccgtttaggtaaagaagtaatggtattcgtttaccgcttggaacgtcagctggctatgttgaaggcttgcccgattaccgctaagtttggcggtgctaccggcaattacaatgcacatcatgtggcatatcctcagtatgactggaaacagttcggtaatcgtttcgttgcagaaaaactgggactggaacgtgaagaatatacgactcagatttcaaactatgataacctctctgctgtttttgatgcaatgaagcgtatcaatactataatggtagatatgaaccgggacttctggcaatatatctctatggagtatttcaaacagaagataaaagccggagaagtcggttcgagcgcaatgccgcacaaagtgaacccgattgacttcgaaaatgcggaaggaaacttggggatcgccacttccattctggaacatttggctgtgaagcttccggtttcccgtttgcagcgtgatttgaccgactctaccgttctgcgtaatgtaggcgtacctttcggacatattgtgattgcaattcagagttctttgaaaggactacgcaaactattattgaatgaaccggctatttaccgtgatttggataactgctggagcgtagtagctgaggctatccagacaatcctgcgccgtgaggcttatccgcatccgtatgaagcgttgaaagctttgacgcggacaaatcaggcgattacggaaaattctatcaaagagtttatcgaagaactgaatgtaaacgaagatattaaaaaagagttaagagcaattactccgcatacttatacggggctttaattgtttacttatacaataaacgtgttttttaaataggccgtgaggccaaagtctaattttattcgaataaaaaaatgagcacagaaaacgaagaatggcgcgaaaattctttcaatgaagagaatacaggtgccggccgtgatggtaacaggtcgtacaacagagagggaggagaacgtccgtatcgtccttcttacaaccgtgaaggtggggatcgtccgtatcgcccgagatttaatgccaacaatgaagggggcgaacgcccacagcgttcgtatggtgatcgctcttatggcgaccgtccgcaacgtccttcttacaatcgtgaaggcggtgatcgtccgtatcgtcctcgcttcaataacaatagtgaaggtggcgaccgtccgcaacgtccttacaaccgcgaaggtggttcttatggtgatcgtcctcaacgcccttcctacaatcgtgaaggtggtgatcgtccgtatcgtccgagatttaatccgaattctgacggcagcgaccgttctcagcgtccttacaaccgtgaaggcggcgaacaacgctcttatggtgatcgtccgtatcgtccccgtttcaatagtggtgaaggtggcgaccgtcctcagcgtccttacaaccgcgaaggtggtgaccgcccgtatcgtcctcgcttcaatagtggtgaaggtggaggctatcgcagcaacaacggtggtggctatcgtccgagattcaataatgaccgtcagggcggttaccgtcctcgtccacgtaccagcgattatgacccgaatgctaaatatagcataaagaaacaaatcgagtacaaggaacagtttgttgacccgaacgaaccgattcgtctgaataaattcctggctaatgccggtgtttgttcacgtcgtgaggctgatgaatttattacagcaggtgtggtttctgtaaatggtgaagttgttactgaattgggtacaaaaatcaaacgctcggatgtcgtgaaattccacgatgaaccggttagcatcgaacgtaaggtatatgtattgctgaataagccgaaagatactgttaccacatcggatgatccgcaggagcgccgtacggtaatggatttggtaaaaggcgcttgtaacgaacgtatctatccggtaggacgtcttgaccgtaacacgactggtgtactgttactgacaaatgacggtgacttggcttccaagctgacacatccgaaatttctgaaaaagaaaatttatcatgttcatctggacaagaacctgacaaaagcggatatggatcagattgcagccggcatccagttggaagacggtgaaatccatgcagacgctatcagctataccgatgatttcaagaaagaccaggtaggtatcgaaattcactccggtaagaaccgtatcgttcgccgtattttcgaatcactgggttataaagtagtaaaactcgaccgtgtattcttcgccggactgactaaaaaaggtttgcgtcgcggagactggcgttacctgtcggaagcagaagtaaactacctccgcatgggttcgtttgaataataagttaataaataacaacttggcagaggacggggaaagaaagcaggaaaaatgaatcttgtgttttaaacctcgtcttcttgtatctaaaaagaataagttaaatggaaaagattggtagaacaaaaattgttgatctgttgaagcgtacggatatcggcgctatggtcaatgtgaaaggatgggttcgcacccgcagaggtagcaaacaagtaaactttatcgcactgaatgacggttctacaataaataatttgcaggtcgtagtagatttggctaattttgatgaagagatgctgaaactgattactaccggcgcttgtatcagcgtgaacggtgaaatggtggaatcggtaggctccggccaaaaggtggaagtgcaggctcgtgaaatcgaagtgctgggtacttgcgataacacatacccgttgcagaagaaagggcactctatggaattcttgcgcgagattgcccatttgcgtccgcgtaccaatacttttggtgcggtgttccgtattcgtcataacatggcaattgctatccacaagtttttccatgacaggggattcttctatttccatacgccaatcattacagcttcagactgtgaaggtgccggacagatgtttcaggtgactaccatgaatctgtatgacttgaagaaagacgaaagaggttctatctcttatgatgatgatttcttcggcaagcaggccagtttgactgtttccggtcagttggaaggtgagctggctgccacagctttgggagctatctatacatttggtcctacgttccgtgccgaaaactccaatactccccgtcacttggctgagttttggatgattgagccggaagttgctttcaacgacatcgcagacaatatggacttggcagaagagttcattaaatattgtgtgaaatgggcgttggataactgtgcggatgacgtgaaattcctgaatgatatgttcgataagggattgattgaacggctgcaaggtgtattgaaagataattttgtacgtttgccttatacagacggtatcaagattctggaggaagctgttgcaaaaggccacaaatttgagttcccggtttattggggtgtggacttggcttccgaacacgaacgttatttggtggaagaacatttcaagtgtccggtaatcctgactgactatccgaaggagatcaaagccttctatatgaagcaaaacgaggatggtaagacggtacgtgcaatggatgttcttttcccgaaaatcggtgaaatcataggcggttccgaacgtgaatcagattatgataagctgatgactcgtattgaagaaatgcatatcccgatgaaggatatgtggtggtatctggatacccgcaagttcggtacttgtcctcactccggcttcgggcttggttttgaacgtttgttacttttcgtaacaggcatgtcaaacatccgtgacgtgataccgttcccgcgtacaccgagaaatgctgatttctaatatttcggtatatttatgtaaaactcgcataatcttttggttatgcgagtttttttatgcactttattgttctattctcaaaataaatctttatatttggacatacgcattcaagagtgttaactaaaataatacggcaatgaaaaaactctatttctttaccatgctttcaataatgttgttggcggtaacaggtgcgatggcccaaaagaaaactaaattcaaggtggccgagttgaaaggaatctggcaactttgccattatgtgtcggagtctcccgatgttccgggagagttgaaacccagtaatacatttaaggtattgagtgatgatggaagaatcgtgaacttcactattattcccggttccagtgcaattgttacgggatatgggtcgtggaagcagttgacagatgattcttatagagaaagtatcgagaagaatattcatcttccgatgttggataatcaggacaatattctggaatttgaaataaaggatagcgattatctgcatttaaaatacttcatcaagaatgacttgaatggaaatgaattgaacacctggtattatgaaacctggaaaagaataagtatgccggccaagtttccggaagatattgtgagataaagataatttgattgttattatagtctgcatattacttctttaaaggagaagatatgcagacttttttatgcctgtttttcgttctatttcttcttgtttgccaattagatatattcaaaaaaagcaagaaatagtttgccaattcaaagaaaagccgtacttttgcaagccgattattatcacaaaatgataagagattaattcatagcaagttagtcgtcctttgtccggggaagactaataagtggtgaagaatatttttagtagtaacatttaaaaaacaaaattagagtggatactttaagttacaagaccatttctgccaacaaagcaacggtaaccaaagaatgggttattgttgacgctacagaccaaacactgggtcgtctgggagcaaaagttgcaaaattgttgagaggaaagtacaaaccaaactttactcctcacgtagactgcggtgataacgttatcatcatcaatgcagacaaagtaaaactgactggtaacaagtggaatgacagagtttatttgtcatatacaggctaccctggtggtcagagagaaatgactcctgcccgtttgattgcaaaaccgaacggtgaagagagattactgaaaaaagtagtgaagggcatgcttcctaagaacattttgggagctaaattgctgaacaatttgtatgtttacgctggtagcgaacacaaacaagcagctcagaacccgaaaatgattgatattaattcatataaataagatataatggaagtagtaaatgcattaggcagacgtaaacgtgcaattgcacgtattttcgtaagcgaaggtacaggaaagattactattaacaagagagaccttgcagagtactttccatcaactattcttcagtatgttgtaaaacaaccattgaacaagattggtgctgctgagaagtatgacatcaaagtaaacttgtgtggtggtggtttcacaggtcagtctcaggctttgcgtttagcaattgcccgtgcattggttaaaatcaacgctgaagataaagctgctcttcgtgcagaaggttttatgactcgtgacccgcgttctgttgagcgtaagaaaccgggacagccgaaagctcgtagaagattccagttcagcaagcgttaatgggctgcctgaccgaggaatatgtttagtatctaaactactgggactctactcatagactacccggcggttggtttagaaaaaacaaaaaagaaagtaaacgatttaaagaaaaacaagatgtcaagaacaaattttgatacattattggaagccggatgccacttcggacaccttaaaagaaagtggaaccctgcaatggctccttatattttcatggaacgcaatggtattcacatcattgacctccacaaaacagttgcaaaagtagatgaagctgctgaagctttgaaacagattgctaaatcaggcaagaaagttctttttgttgctactaaaaaacaagctaaacaagttgtagctgagaaagctcaatctgttaatatgccttatgtaatcgaacgctggccgggtggtatgttgactaacttcccgactatccgtaaggctgtgaagaaaatggctactatcgacaaattgactaacgatggtacttattctaacctttctaagagagaaattcttcagatctctcgtcaacgtgcaaaattggacaagactttgggttctatcgctgacttgactcgtctgccgtctgcattgttcgttatcgacgtaatgaaagaaaatatcgcagttcgcgaagctaaccgtttgggtattcctgtatttggtatcgttgatactaattctgacccttcaaacgtagatttcgtaattcctgctaatgatgatgctactaaatcagtagaagttattctggatgcttgttgtgctgctatgatcgaaggcttggaagaaagaaaagctgaaaagatcgatatggaagctgccggtgaagctcctgctaacaaaggcaagaagaaatcagctaaagcaagactcgacaaatctgacgaagaagctatcaacgcagctaaagctgctgctttcttgaaggaagacgaagaggcttaatataataatgtgccaatttgctaatgtgcaagggtatgcttatacacttgcatcttgattggcagattggcacatttttttgttttgaaaattattattcatttaaataaaagaaattattatggctgtaactatggctgatattaccaagctgcgtaaaatgaccggagctggtatgatggattgtaaaaacgcattgactgaagctgaaggcgatttcgacaaggcaatggaaattatccgtaagaaagggcaagctgttgctgctaagcgttcagagcgtgaagctgctgaaggttgcgttttggctaagactaccggtgaccgtgctgttatcattgctttgaagtgtgaaactgactttgtggctcagaatgcagattacgtgaagctgactcaggatattcttgatcttgctgtggctaacaaatgcaagactttggaggaagtaaaagcattgccgatgggtaacggtactgtacaggatgcagtagttgatcgtagcggtatcactggtgaaaaaatggaacttgatggttacatgactgtagaaggtgtatgcactgctgtttacaaccacatgaacagaaatggtctttgcactattgttgctttcaacaaggaagttaacgatcagttggctaaacaagtagctatgcagattgctgccatgaacccgattgccattgatgaagatggcgtttctgaagaagtaaaacagaaagaaatcgaagttgccattgagaagacaaaagcagaacaggtacagaaggctgtagaagcagctctgaagaaagctaacatcaacccggctcatgtggacagcgaagaacacatggaaagcaacatggctaaaggatggattactgctgaagatgtagcgaaggcaaaagaaatcattgctaccgtttctgctgaaaaggctgcacatctgcctgaacaaatgattcagaacatagctaaaggccgtctgggtaagttcttgaaagaagtttgcctgttgaatcaggaagatatcatggacgctaagaagacagtaagagaagtgttggcagcagctgatcctgaactgaaaatcgttgacttcaagcgtttcactttgaaagctgaataatcagtcaggaaactgagaatataggaggctgtcttcaaatctttttttgaggacagcctcattttttttgttatttcaatgctttgtctatttccttcatcaacttgtccatttcctctttttggtaaccgacagtagcggatatcactttaccttctttgttaatcaggtaacttctgggaatgtactgactggcaaatttattcgtgacttcccgtttgggatccgggtagagaggaaacgtaaattccttgcgcttgttgtatgccgttaattcctcatcggtatgctcacgtccgatcactatcatgcggaaatccttgttgtctttatatttgggccaaagggttttctgaacttctgccagttcactctggcaaggaccgcaccaagtggcaaagatattaatgagtactactttccctttcaagtctgcggaatttactgttccgttgacggtcgaagtaagggtgaaagcaggcatcttgtcgcctgttttgactatatcccctttgtcgttttgggcaaacgacagcagtgagaataacgctgctacacaaaataaagtaactttcttcatttcttatatcttttaaataagttagcctcctataccctttgttttcgtgtatccttccctgacaagcagttccatgaccttagtcttgaaatccccttgtatgatgatttctccgtctttagctgaaccacctactccgcatttacttttcagcagcttgcccagttccttcaagtcgttctccgtaccgacaaatccggtaattaatgttaccactttaccaccccggtttttcttgtcaatggaaactcggaggttttgtttgtctttatcgagagtgacctgttcttcgtcattatccatttcgtagccaaaatcagggttcgtggaatacactacattcagcctgtctttccaatcgttctttttcatgcttcttctttttatttcttcccaaaagtatcaaacttatggaaaagagcaaaatttgcattggttttcattgttttgtttaatctctattaaggttttgcgatattgggttgtcagtctcaaaaaataatgtacttttgcaaaataccaaataatgtaagaagtatgagcacttatataccaaaagaggcggataaagtgccggagcctaccttgcgcagacttccctggtatctgtctaatataaaactgatgaaagaaaaaggagaacaatacgtttcttctacacaaatctctaaggaaataaatattgacgcatcccaaatcgccaaagatttgtcgtacgtcaatatatcggggcgtacgagagtggggtataacattgacgcactgattgaggtattagagagctttctaggatttaccaatatgcataaagccttcttgtttggtgtaggtagtctgggggccgctttgctccgggactcgggtttgcatcatttcggactggagattgtggcagcttttgatgtcaaccccgaattggtgggaaaagacctgaatggcattcctatttttcattctgatgatttcgaagcaaagatgaaagaatatgacgtgaatatcggtgtgctgacagtacctattaatatagctcaggaaattacaaataaaatggtagacggaggtataaaggcggtatggaattttactccgttccgtattcgcgtaccggagaatattgtggtgcagaatacttccctttatgcccacttggctgtaatgtttaaccgattgaactttaacgagaaataaatgaagattattgcagtaggaatgaactacgcccggcacaacaaagaactgggacatacacagataaatacggaaccggtgatttttatgaagcccgattccgctatcctgaaagatagtaaaccctttttcattcccgatttttctaacgagatacattatgagacggaactggtggtccgtatcaaccggctggggaagaatatcgctccccgttttgctaaccgctattatgacgcagtgaccgtaggcattgactttactgcccgtgaccttcaacggaagttccgcgagcagggcaacccctgggaactctgcaaaggctttgactcatcggctgctatcggtacttttgttccggtagatcgctataaggatatccagaacctgaattttaatctcctgattgacggtaaggaagtgcagagtggctgtacggcagatatgcttttcaagatagacgatatcattgcttatgtcagccgttttgtgacgcttaaaatcggagatctcctgtttacgggtacgcctgccggtgtaggtccggtcagtatcggacagcatttgcagggatatctggaaggtgagaagctgctggatttctatatccgctgattcatctgttcatcaaaaaaacgtttagtatacaatttatgaaaataagagtaggttttggcttcgatgtacatcaactggtcgaggggcgtgagttatggttgggcggtgtccttttggagcatacgaaagggctgttgggacattcggacgccgacgtgctgctgcacgctgtttgcgacgctttattgggagcggccaatatgcgtgatatcggttatcatttcccggatacagccggagagtttaaaaatattgatagcaagattctgttgaaaaagaccgtggaactgattgccggcaaaggatataaggtcggcaatattgacgcgacgatttgtgcggaacgtccgaagctgaaggcacatatccctttgatgcaggagacgatggcaatcgtaatggggattgacgcagatgatatctcgatcaaagctactactaccgagaagcttggatttaccggtcgtgaagaaggtatctccgcttatgctacggtactgatagagaagactgattaaccccctaaaataaataaaacatgattagaactttaaatttctgcttaacactgttagctttattcttaactactttctgtatggctcaaaagagcgagttgaagtttaataaagacggtaagtttaaaatagtacaatttaccgatgtacattttaaatatggcaatccggcctcggatgtagcgttggaacgtataaaccaggtgcttgatgccgaacaaccggatgtggtaattttcaccggtgatgtgatttattctgctccggcagattccggtatgttgaaggttctggaacaggtgtccaaacgtaaactccctttcgttgtgacttttggcaatcatgatgatgaacaaggattgacccggacgcaattgtacgatataatccgtaccgttccggggaatttaatgcccgaccggggaactgctttgtcaccggattatgtgctgacagtgaagtcttcttccgatcctaaaaaagatgcagctttgctttattgtatagacagccattcctattcaccgttgaaagacgtgaaaggatataactggcttacgttcgatcagataaattggtatcgccagcaaagcgcagcttataaagctcagaacggtggccaaccagtgcccgctctggcctttttccatattcctctgcccgaatatcatgaagctgtccgtgacgaaaatgcagctctgcgaggtactcgaatggaagaggcttgttcgccgagaataaacacgggaatgtttgccgctatgaaagaagcgggagatgtaatgggggtatttgtcggacacgaccacgataatgattacgcggtcatgtggaaaaacatcctattggcttacgggcgctataccggtgggaacactgtgtataaccatttgccgaacggcgcccgtatcatcgtattggatgaaggcgcccgtacatttacttcctggatccgtcagaaagacggcatcgtggataaagtctcttatccggcaagctttgtcaaggacgattggactaaacgttgaggttggtaaacttcacatgactaaggcgtgtatatttagaaccatagctttcgtatcggcgtgacactttcgccgattcgatgtagataatctctcccagtcggtattcatgttctatcccggatagagtacatgatactgcactgggatttttagatggaatactcataacagccaagttgccgcttgcatcggtcagtgtgagtatctgtttgacaaaaaactgtggggtggttccgtttactcttgtcttgtacgggtcatcttccagccgcacacgggtcactttcagtttcaagtctgtcagtttctctcccagctctcccagataccggcttgacgaacgtttctctctcgattttctctgcattatatccaggtgtatggagtgatacgcctgtgctattttgacgaaacgttcctgtttgggaatctttggagtaaacttataggctatccaacttaaataggaaggggctatttttaggatttcatgcaggaagtgtccgcgatatttcccgaagaagatcagatcgtcaccattactctgcattcttttctcattataatccacaagaataaggcagcgtttcgagtaatagaacatcgtactggccactcggagagactcgttaatatccggtgacagatcatgtatgtaaagaatcgactgtttttcgggcaggggagaatagagccaaagggaatagtttggtttccccggtcggggtaacaccaccaagtaaacaccctcctctttgaaagaggctctgcctcggttgtactcattcagtttggcatacaataaggcttgctcgttctcggaaatgcccggtaatctggggttagccataattgttctcgcttttggtatatttcaaatataggcaattttattcagaaaagcaacttcttttttataaaatcacttcaattaagtatcgttttgaggaaagacagcttcactaataaaaattatacatacattttaccctcatactttcatagatagccttaatccctttattcatcatggttacaggtatgagggtaactatgagggtaaggtgagggtaacttttaccctcatagcgtgtctggtcttgattttggttgactggctatactacacaattctcctatatactatacattagtgcttaggttttcttctgtaaactctcaatgttcttcaaaaactcacataagttagcaaaattgtttacgtatgttagcttatttgtttactgatgatagcttgttgattcacagtagtgagctcttgatgatttctaagggaaaacatataaactatatagctaatatgcttggaatgcaggtgtttatcagaagaagtacctatgtcttgaggccaatcctggcaagggcgatacatgaaaaatgatattattagatgatacaaggggtaatattaggcttttataggagacggattgcatgataagcctggatgaatacacttcttagcagtgttttatttcctgaaatgttaaatataataattcttatatagttaatgtggggttaggaagttatgaggtgtatttatattgtacacaaccaaaacgagaaagtacaatgactgttgaccttatacctgaaataactgactatattctgttgaatgtttattcattcgccttttccgacctgtataatggaaaaaccggtgtttctttagctctttttaaaccacccctatttatgaaggatgattatctgggaggaatatcatcgtagatatcttgatataggttatctctagtgaatgtacaaagaaagacatagtataaaaagtaacgttttaaatcaccaataaattaagtattatgaaaaagttcgcatttagtttttagtattgatttggatatgtagcaatattcaaatggcagctcaggagaaaatgcttcaagttcgtgaagatggagtttatatgtatgtagaccaaatgcctgtatatccaaaagggcaggagggaataatgcaatatatagcaaaaacggtaaagtatccggcttatgcaagagcaaaaggagcatcgggaactgtacttgtgcaattcgtgataaagaagaatggtaaaacatcacagtttgaggttgtgcgaggagttgacccgttgttggacgaggaagcgcttcgagtagtaaaaggaattccaggaaaatgggtacccggtagagaaaaagggaagaaagtcccggtgtcatatactatcccggttagtttccgattgagtggggaaaataattcttcctcttcaaatgaaggactgaaggtgaataagaatataaaggcgtctttggaaggagtctggcaaatttgtactcatgtggaacctttaggatacggaaagtttgatatccaaaccggaccttatatgaaaatattatcatcggataagaactttttcaatatacatttagcaataacggatgagagagctgttataacggcaatgggaacttatgctcaaacatctgactgtacttatgttgaaaaaatctttaaatcgataactgatccggaactaacaggagcagatagtaaactgaaatttgaatttatttcggagaatctgttacagattagttatcaattacctggtcgctcgttgccgagtaaagaaatttgggttcgggttattcagccgaatttgaagcaacctgaattgtttcctcaaactttgtgacaactagcagtttgtgaaaagatatagtaacaaataatatttcagaagaacaataaaatagtattctctacatctatgatgtttcgttcgcaataaatttatattctccgaagaatcccgtatatttgttgccatataattttcagaattcggatgaaagaacgaaataaaagagtattagtcggaatgagcggcggtattgacagtaccgccacttgtctgatgttacaggagcgaggatacgaaatagtaggagtaaccatgcgtgtatggggcgacgagccgcaagacgccagagagctggctgcgcaaatggggattgaacattatgtggcggatgagcgtatccctttcaaagagacgatcgtaaagaatttcatagacgagtataagcaaggacgtacgccgaatccgtgtgtgatgtgtaaccctttatttaagtttcgtgtcctgacggagtgggcggacaagctgggttgtgcctgggttgctaccggacattattcccgcttggaagagagaaacggggatatttatatagtagccggagatgatgacaagaaagaccagtcttattttctttggcaactggggcaggatgtattgaggcgttgtattttccctttgggggattatacgaaagtgaaagtacgcgaataccttgctgataaaggctacgaagccaagtccaaagaaggagagagtatggaagtctgctttattaaaggtgattaccgtgacttccttcgtgaacagtgcccggaactggataacgaaataggaccggggtggtttgtcaattccgaaggagtgaagttggggcagcataaaggtgcgccctattatacgatcggtcagcgaaaaggcctggagattgcgttgggcaaaccggcttatgtgttgaaaatcaatccgcagaaaaatacggtaatgcttggcgatgccgaacagttgcggacggattatatgctgacggagcaagataagattgtggatgaacgggaattgttccaatgcgagaatctgacggtaaggattcgttatcgaagccgtccgttgccttgccgggtgaagcggttggcggatggacgactgttggtgcgatttcttgaaacggcctcggctattgcccccggacaatctgctgtgttctatgacggaaggcgggtactgggcggagcttttattgcttcgcaacgaggaatcggattggtgattttggagaacgaaggattttgattgattaaaacaaagataacttatgaagaaacttgtattattggtttttgccttgaatatttgtttgggtacttttgcgcaattcacgccgggggataccctgaagtatcgtatcagtctgaaagacaaagcggctacggactactctttgcaaaagcctgagatgtatttatccaagaaatctattgaacggagaaaaagacagggattggagatagattctactgacctgccggtatgtaagaaatatgtggatgcgatacgcaagaaaggcgttcatgtgcttgttacaggaaaatgggataatttcgtcactgtttcctgtaatgatagtatgttgattgctgaaatagccgggttgcccttcgtccgttccacggagagagtttggagaggtgtcgccaaacgagcttctgagagagattcattgattaataaacctttacgtacggacagcctttacggtcccgcaattactcaaataaagatgagccatgcggaccgtctccatgaagcaggcttcaaggggcaggggatgacgattgctgttattgatgccggatttcataatgttgacaagatagaggcaatgaaaaatatcaatattctgggtactcgtgacttcgtgaatccggaagccgatatctatgcagagagcagtcacggaatgtccgtgctttcctgtatggcaatgaatcagccgaatgtgatgattggtacggctcccgaggcctcttattggttgcttcgcagtgaggacgagtattcggagaatttggtggaacaggattactgggcggcagctatcgaatttgccgatagtgtcggagtggatttggtaaatacgtctctcggatattattcatttgatgacccggcgaagaattaccgctatcgtgatttgaacggacattatgcattgatgtcccgtgaggcggcgaaagcggcagataagggaatcgttgtagtatgcagtgcgggaaactccgggtccggttcgtggaagaagattacgcctccgggagatgcggagaatgtgataaccgtaggtgcggtgaacaaatatggagttctggctccgttctcttctgttgggaatacggccgacggacgggtgaagccggatgttgttgccgtaggtctgggctcggatgtaatgggaacggacggtaatttgcgccatgctaacggaacttccttttcttctccgattatgtgcggaatggtggcttgtctgtggcaggcttgtccggagctgactgcaaaagagattatcgaactggtacgccggtcgggcgaccgggcagttttccccgataatatatatggatacggcattcctgatttgtggaaagcttatcaatctacggtaaacactcgccgttgattatggactcgctttctcttttagaactgaatgcgcttgttcgccgcagcctggagcagtgcttgcccgatgaatattggatacaggcggagctgagtgacgttcgttccaatacgacgggacattgctatctggaattcatacaaaaggatccgcgtagcaatagtctcgtagccaaggcacgcggtgtgatctggaataatatttaccgcctgctgaaaccttattttgaggaatctaccggacagctgttcacttcgggaataaaagtgctggtcaaggtgaccgtgcaatttcatgaactctacgggtatagtctgacggtactcgatatcgaccctacttataccttgggagatatggcgcgtcgccgtcgtgagatactgctgcaactggaagaagaaggagtactgacgttgaacaaagagctggaaatgccggttcttccccaacgtattgcagttgtttcttcagctacggcagccggctacggtgacttctgtcatcaactgaaacataattccggtggcttcttcttttacacggagctatttccggctttgatgcaaggtaatcaggtggaagaatccgttttggccgccttggattgcatcaatgcccgtataagcgagtttgatgtagtcgtgattatccggggcggaggagctgcttccgatttatccggatttgatacttacctgctggcagcagcctgtgcgcagttcccgttacctgtcataaccggtatcggacatgagcgtgacgacaccgtgctcgattccgtggcgcatactcgtgtaaagactccgactgccgcagccgaactcttaattcaacgggtaggagaggcggcggaacgtcttgaagaattgtccgcccgtcttcagcaaggagcttatactttgctggaacagaagcagagaaggctggttacaatgcaagcccgtattcctgcactggttcatcggaagctgtccgaagcccgttttaccctgctgacagcccggaaggacttgtcgcaggtgacgcaaaacttgctgtcccgtcagcggcatcggctggaactattgcaacagcgcgttgcggataactctcccgaaaagttactcagccgggggtatagcatcacgctaaaggatgggaaagcggtaaccgacgcatctttactgcagccgggcgatcagttgaccacccggcttctgaaaggagaagtgcagtccaccgtccggtagcgaacgttccgaacccggtatatttagagttttattatcaaccattaaatacatatcactgtggcagcaaaaaaagaaacatactccggcgctatggagcgtctcgaaaagattgtcaggcagatagacaacaatgaattggatatcgacatcttgagcgaaaaaatcaaagaagccaatgaaattattgccttttgcaccgaaaaactgacgaaagcggatcgcgaagtcgaaaaattattgcaagaaaagcaacagtctgaagaataaaggttatttttgcaattcaatgcataagaaaataaactaatacgttacaatatgaaagaaatagactgggcgaatctgtcgtttggatacatgaggacagattacaatgtgagaatcaatttccgcaatggtaagtggggtgaactggaagtcagcagtgaagaatatcttaacttgcatatggcggctacttgtttgcactatggtcaggaagcatttgaaggactgaaagcattccgtggaaaagacggaaaagtgcgtatcttccgtctggaagaaaatgcggcgcgtctgcaatctacctgccagggaatccttatggcggagcttcctaccgaacgttttaaagaagctatcctgaaagttgtgaaactgaacgaacgttttatccctccttatgagacaggtgcttctctttatatccgtccgttattgattggaacaagtgctcaggtgggtgtgcatccggctgacgaatatatgtttgtggtatttgtgactcccgtgggaccgtactttaagggtggtttctctactaatccttacgtaatcattcgtgaattcgaccgtgccgctcctcatggaactggtatttacaaggtgggtggtaactatgcagccagtcttcgtgccaacaagaaagcacatgacctggggtactcttgcgagttctatctcgatgcaaaagaaaagaaatatatcgatgaatgtggtgctgccaatttcttcggtattaaagataatacgtatatcacgccgaaatcaacttctatcctgccttctatcactaataagagcttgatgcagttggcggaagatatgggaattaaagtcgaacgccgcccgattccggaagaagaactggctacgtttgaagaagccggtgcttgcggtacggctgccgttatcagtccgattgaacgtattgatgatctggagaatggcaaatcatacgttatctccaaggatggaaagccgggaccgatttgtacgaaattgtacaacaagctgcggggtatccagtacggtgatgaaccggatacgcatggttgggtgacaattgtcgaatagtactatctttcgccgcagaggacacaaaggacacggagccttataattcatttataatctctgtgtcttttgtgttctctgtggtgagaaacttataaagattgaatgggaaagaataaattagagaagtttgccgatatggcgagttatccgcatgtgttcgaatatccgtattcggcagtggataatgtgccttttgacatgaagggaaattggcacaaggagtttttcaagaacgatcatccgattgtgctcgaactgggctgtggacggggagaatatacggtcggtctggggaagatgtttcctgaaaagaactttattgcggtagatattaaaggagcccgtatgtggacgggggcaacggagtcgttgcaggccggaatgaagaatgtggcattcctgcgtacgaacattgaaatcatcgaacggttctttgccgaaggcgaagtgagcgagatatggcttacgttctccgacccgcaaatgaagaaggcgaccaagcggcttacttcgacctattttatggaacggtatcggaagttcctcaaaccgaacggtatcattcacctgaagacggacagtaactttatgttcacttatacaaagtatatgatagaaacgaacgggcttccggtggagtttatgacggaggatttatatcattcggatctggtagacgatattcttggtatcaagacctactatgaacaacaatggctcgaccgggggttaaatatcaagtatatcaaattccgccttccgcaagaaggacagttgaaggaaccggatgtggaaattgaactggattcataccgcagttataatcgtagtaagcggagtggattgcagactagtaaataaagaataattgagtggaacgttcgacgttccgctctcaactctgaatgaattatgacactttatcctaaattaatattggatgcactggctacggtgcgttatcccggtacgggaaagaatctggtggaagcggagatggttgctgataatctccggattgatggtatgtcagtcagtttctcattgatatttgagaagccgaccgatccgtttatgaaatctatggtgaaggctgccgaaacagctattcatacttatgtgtcgcctgatgtgcaagttacggttgcgacggaaagcaagcaggctgcccgtccggaagtaggaaagctgcttccgcaggtgaagaatatcatcggtatatcttccggtaagggtggggtaggcaaatctaccgtctcggcgaatctggcagttgctttggcaaaattgggttataaggtcggtttgcttgatgcggatatcttcggaccatctatgccgaaaatgtttcaggtggaggacgcgcgtccgtatgccgaacgtattgacggtcgcgacttgattattcctgttgagaaatacggtgtgaagttattgtctattggcttctttgtcgaccccgatcaggctacgttgtggcgtggtggaatggctagcaatgcgctgaaacagttgattggcgatgcctcttggggtgaactggattatttcctgattgaccttcctccgggcacgagtgatattcatttgactgtcgtgcagacgttggctatgacaggcgctattgttgtcagcactccgcaggcggtagctttagcggatgcccgtaagggaatcaatatgttcactaatgataaggtgaatgtgcctattctcggattagttgagaatatggcttggtttactcctgccgaacttccggagaataaatactatatcttcggtaaggaaggagccaagaagttggcggaggagatgaatgttcctttgctgggacagattcctattgtgcagagtatttgcgaaggaggagacaatggtacgcctgttgcactggatgaagattcggtgactggtcgtgctttcttgtcgttggctgccagtgtggtgcgtcaggttgatcggcggaacgtagaaatggctccgacacagattgttgagatgcataaataagcaagacggacagagattgaatcgcttgtgatgacgacaagcttccgtaatcgtataaaaacgcctccatagttttcgaaaagactatggaggcgtttcctatgatcaaggtgatgtactttacgattacttctttaaagctttcatcagttgctttttcatcgtgtctgtacctgggaatcccgtttgcttgaaggtcgtatttccttctgcatctattacgaaataagtaggaactccgccgattttaaacgtagacatcagatacgcccattgatcatttgttacgcggaaatgttctccgtgaatatcggggatcatattcttccaagtgcctttcggagaggtttctcctgtgatatacaggtaaagaatgtcttcgtctttcagttcttctttcatggggatcatagccttgttggccattcggcacggtccgcaccaagttgcccagaagtcaaccagcagtacgtgtccgcggaatttggagatgatagtcgaaaagagttcttcgtttgttactttcccgatttcattgattttatatccggtcttttgcttgttcagttctatcttcttgagtagtttatcattaaggaccgtcaacaactgtttgtaggcaggagaaggcagggcttcaaggactgctttctgttcggcagtcaatggtgtgaaatcttctatggagcgatagcacttgtatgcttctcccatttgaaacaagattccttggttggtacccaacttctcttccataagatcttttctggaactgaatattcctgctccgtatgcaaattccggggcgtacaaatctaccggctcattgagtgtaaaatctttgagtacatcaagataatcgactggaaattctattttggtatttgtgtaatactctttagtctgttctctgtttaatttctgactgacaacatgggcacgcatgataatgtcttttcccataaataatccgatagctgtggtaatatccgtattggctttcagaatttctttggcagcagaactgagagaggcttcatctatctgtttgtaggtgttaagacgtttctctaaaaagtaatcttttagtccgtttatatcttttccggctacatctttgacaatcttgctcgggttgtcaaccaagttacttggaatagaattgtctgataactcttgttgaaggtcagccagataacctccataataagcttttttgccatagggcttgttgtctttctggagatgtgattgttggcgtgaacactcggctgtgttaacgatgatagtactttcttttccaggagccagcaagcaaggaatttgtgcaaaggggaaaacaagggtggcaggagttacggtaataacatctgtctgaacctgaaaacttccgtcttccttgatagttacttcttcggcataatttaaccacctgatcgggtcgtttaaacgtaactgtccggagcttggcatatctttttgataccctgtcacttgtccttttaatgttgcttttccatacgcaaattcaggtaccggcagttctgcctttttgtttatcttatgaataacggctcctttgggtaatgcagacttacggaaatctttttcattcaactgtattccccatattttgtatgctccgtcaaaatctccttctgagaaatccagacttgttacgtttgctggtatgggtgggaaaagtaactgaaattctgcctcaccggattcaggcatccagaattctttgtccaatgtgatgcctacacctttgcggatcgggtataaggcccctttttcatctttgaggaaactgccactggctatttttatccagtatttcggacgataaaatgctttgatgtatacagtggtaactgtgtcactcatgacaattttgtcaacttcaatatttgaagagctccaagctagaaaaggtgggcgctcgataactctgtctttggcttgtacggtgcaaactacgcagagtatcaaacccataatccatgagaatcttttcatacgaatagtgtttatttcgaacaaatataacgatatttttgtgactatcctcaaaaaagtagaaaaagatgtatcttttttccgataccgatgaacgccttatctcccccggtatgggggaggaggcgcggcaccggggaaatgtttattgtaatttgaaaactatcggaagggtatattctactgcaatggcttgtccgccttgttgtccgggttcccatttgggcatagtgctcactacacggatcgcctctgcatcaagcaacggagatatgctacgcaatacttttatattggatatgcttccgtctttaccgacaatcatttgtaggatgactctgccttgctccttattcttttgtgcaatagtcggatatttgatgtttctggcaagatattgcatcagaccgggtattcctccggggaatttaggcattacttccgctactttgagtgctgtacctgattttgcgtctgttgcgttggcattagaatcttcttttggaccatacgctactacaactacttcttccagatcagcttgttttatttcttttccctttgaaggagctggaccttgtagcctgaacattacaggaactgagaatctgacatttacattttctcctctttgtttacccggtttccattggggcatagcggcaattactcttacagcttccttgtcaagatagggatctacgcttcgggctacttttatgtcggatatgtttccgtcttttttaacaacgaaactaacaatgacgcgtccttgttttccgttttcatgagctgttacaggatatttgatgtttttagctaaatattgcatcaaggcttgttgccctcccggaaattcgggcattacttctacaacttcaaataccacagaatcgggtatactcttgctttgagcgataggtgttgactttgcgatttcttttttggccggcagagcgactgtttgctgaatttcttcactttgcagttcggagatatttgcaatttccggctgaggagtgttaacctgttccataacctcttttgcaaatctttctgtggtacgggctactacttcgatgttgctgacaatcatcaacagggcagccaagggaagaaacatgatatattttgttcttcctatttctttggttcttcgtttgttcatcattttgatacgatttttaagtggtaaaacattgaaactatttgataaatttgctgcagccttgtgatgagccagtcctaacaagtggtactggtatgatttactgtcatgtcccgtctccaatacccggctgtctgccatgtattcgagattgcctctgacttcccgtttcataagccagctaaatggattgaaccagcagaatatgcacattatttcactgattaatacatctatcgagtggtattgacgggcgtgagtttcttcatgggtgattatctcactaatttcagagtcggtatgtgactgtgggtgtatgaatatccaatgaaaaaaagagaacggtcctgcttctttctttaataggtgtacacgcactcctttcaattggcttttggaacattgaaaatgcagtcgcatgatacttcctagttgaaggaagaaacgggcggtcagtagtaatactccgctccaatagataatgcctgtgagaagtttgattagctcttgccaattaatctctgtttcttgtggaatggtaacgacttgttccggaagtatgattgttgcataaagatctgccattgctaccattggctcgtgtgcttttatccacccttcaatatttagtaaagggtagagcaaggaaatggcaaaaaaacataacaaggctatccgtcgccagtgaaagaaggtgtctttatgaaagaacaaccgatagaaggcgtagaacaaagcaattgctacatttatctttagaaaataggctaattccggagtcataatggatatctttttactattaattatcttttcctttttctatcagttcgataatgtctttgagatcatcagtcgataacttttggtctttggcaaagaaagaaaccatttctttgtaggaattttcaaagtaattacgaactacgctactcataaagtgacgtttgtattcattttctcgaatggcaggagtgtattgataggtatttcccacacgttttgatgtgacatacccctttcgttcgaggttttttacgatcgatgctaccgttgtataaggaggagccggttgcggatacttcgcaacgatatcttttacgaaacagctttgtaactcccaaacgtagatcattacttcttcttcttgtattgttaacttttccatggagatgttgtttaattacgattacttcgcaaatctacgaatatttcgtaataaagcaataattagtcagttaattattgtaaatgtatgattgctgcaataatattttgattaaggagtaatcggaaaattatttaagcataaaaattggttggataggcgctatttttgcctaaataatcacactttaataacatttgtggaaaaaaggtatcattggagacttttttatataaaataaatgaaatatatttgtggctgtaaaacagacgttaaatatgaaaggtgcgtttcgatactgttgataaggtacggaagattccccgcacttagcgaagaagttaattaataatgccaaccagagggaggaggaaggtacactaaaaaataaatgatatgaaaaaaggtttgatttttgtgctatttgcacttgtttctatcgtttcttattctcagatttcttggaatgctaaggtcggtatgaacatgagtaatttcaccggagattctgacactgacatgagagttgggtttaatgttggtgttggtatggaatatcagtttactgatatgtggtctattcaaccttctttgatgttcacccagaaaggagctaaaatggatgagttgaaagctaatcctatgtatttggaaattcctgtaatggctgctgcgagatttgcaattgctgacaatcaaaatattgtggtaaaagcaggcccttattttggctttggtattgctggtaaatataaagcagggggtgaaaagattgatttctttaaagacactaaagatgaagacggtgatatcttaatggaaggtgcaaagaagttcgatgcaggtcttggtgtaggtgttgcttatgaaatcaataaattctttattgatttgactggagaatttggtttgactaaaatatatgatggtgatggtgctccgaagaacatcaacttctctatcggtgtaggttacaaattctaatagaattatactctctttataatatctctgaaaatccttcgccttatactctctttgggcgggggatttttttatgggtttctccttataaaaagaaaaacggcgtatcctccttataaaagggggcgccgttactatctctctcttttgttgtttcaatcagttatttatctgctttgataaattctctttctcttttaattctttatatctttctattgcatgtttacgactcataagtatttgccaacgatatacccagcaagtagttaagaaataaaagcctgcttgtaaccataaagctttatattcaaaggcaacttcacttagcgtagctcccatattgttgattttcacaaaaccattaatcccgaaagtagaggggaaaatataggagacgtatttccagaatggagggattgcggcccccggccatgaaattccggaaataaacaacaagggaacggatgtgaagacaaagatcagcatacacgtttctcggttgcgaatggcgatcgaggccgtcattgcaaagaagatgcaagctgtcaggtaaggaaccacaaataatactaatgaattgggctgtcctatttggttgaggctgaatagtcttggtacgacatatagtacataaaaagctaccaatatataaaccagaaaataacttagtcctttaccgagtacaattcgtaatgttccgttgtaatgcctgttgataggtacaaggtctttgaaacggttgttttcgcgggctgttccggcggcaaggccgattcccagcagtaatgtctgttggataatcaatactaggacggcaggaatcaggaaggcagcgaatccggcagtcggattgaagatcgagatttcttcatattctatcggataagcagtgatttcatcttgccggtcggtagtgtttccgctacgtgcaatcttgatgtccttgttcatatccagtgagacggcggtgttggcaatcagcatggatttatagtataacagtccgctcatgtcgcagtaaatgctgacttgcgtctgttttcctttggcgatattgtcactaaaatcggaagggatatagataatgccataggcacgtcggttcttcaacatctgtttagcttcttccatatcagcacagtaagagacgatttgaatgtccggtgtggcgtccactttccggagatattcacggctgagagaggaatgtgagtcatctacaacgacagccgggacttcgcgcaccacttcgttatcatagataaagctatataacaaaggataacccaatgggacgagtataaagaatatcagtaccccctggtcgcggaaagtagtctgaaactcccgtttccagatataaaacaggtcgttgatgccttgggctatcttgtcttttaattttatatctttcatttagggtatgtatttatagtaaaccagtgcctccttcaagcggtgaaccacaaagaaggggagcatcataaatattaatagtgccatgtaattgctccaagagtaagccatgctatatccgttgagtgcctggtcgacatagattagaaaataatgacgcaatgggaataggttgctgagcgcctgcagtacagggtgcattgccataacagggaatgagaagccggaaatggagaaagaaatgacgccccacaaagaggcaaaacttaatccaagccggagagtgggtaatgtacctatcatgactataccgcaacattgcgatgctagtacaaggcaaagtgtggcgaaaatcatagggaagataccactattgcatgggaaatggaggaaaccgtataagtatacattataaaatatacccatgatgaaaaaaacaactgtatgtggaagcagtttccctgccagtgcaatgtaaatggagttattgctcatgcgtaaccattcacgggcggtacggtctttgatttccaccccgatagaataaaccgttaccataaatataagcagcataagaacacccggtatcaatgtgttgcatagatatacagagtagttcagccatggattatttaatggatgcgtatcaatcacgatcggttgaagaaaccccattgcctgatcttccgtggcgccttttgcatagagtgtggttcgtgcggcagcaccggctgtcagttctcccaacattttcatatccctgaaaagcagggagcctgcaatcagataagaataattggtatagaaggaaattgtgggttgccgttggctttgcgcttcggcggacagacctttcggaatgtagaagaatccgtagattttcccttcctgtacggcaatacgtgcatcactcacattgctgtaatgggcgacgacacctgtctgcgaaaaagcgtccagattgcgcacgatgttgcgggaggtagatgaatcatccatatctaccacacctgccggaagatctttgggaagtcccgaatccattaaagtagtgaaaaatacatagcagaacaatggagctatcaccatgcaaaagagatatagcggacgtgatactaacctccggcactctctttgcatgacctgccacaatgctatatattttttttctctctctttcatggttacttatcaatgatgacagacatacccggacgaagattttctattttctccagagggctggctttcacttcgaatgttttcaggtcgaactggccggttgttttggttgccttccaagcagcgtaagtacctaaatctttcagataatatactttcagtttgatggctttattgtcaagtgcaggtacaacagcttcaaattctgttcccatagtcaggtttttgagcaagtcttcacgtacgttgaacgttacccacatatcgttgagttcggcaatattcataatcggtgcgcctgtacctaccagttcgcctactttgggaaatatctccgatacttctcccgaagcaggagcgatcagatatgtctccttaatataagattcaacttcggcaacagctccttttgcccggttaaccagtgcttccgcagccattttgtcctcacgttcggctccgttcttagccattgtatattgtgctttcgcagctttctcagtggcaatggcggcgtcacgctgtgcagtaacttcgtccagtttttgtgcgggcattactccttgttcataaaggttcttcaccctcttgtatgatttttcggcaatggtaactcctgcctgtgctttttgccacatttcataagcagcctgtatctgttcctggcgggcacccttgattgctttttcattctgcgcttgtgcggcagcttccgcggcacgcgcctgttccattttggccactacgtccggcgcttccaggatagccagtgtgtcaccggcatttatttgttggccttctttcacgcgaaattccaatatacgtcccggaactttgcttgaaacacgatattcagtaacttcagcctgtccttggataatctcaggtcctttgcgaagcatgaaaaaaccaacgactgcaacgattgcaataactcccagcagggtaaggaatgcaagcagcatattgctgttttgtgattttgtagttgccatataatatgagttatttaagagttcctaatgatttctttagatagatttctgttaattttacgtctatttgagcgtcaatcttttctgattgggcagatagccaggctgtctgggcttcaagaacattgctggtggcaatgactccctctttgaagccgagtgtggcgtaacggagattttcttccgccttttccatattcttggtagacatcaccagctttttacctgcttcatttactttgaatgcagcttgattgacttgcaattctattttttctctagcgtcttgaagttggtattgtgcgatacgtgcttctgatttggcggctctggttttgtaaataccttctccccaatgccatataggtatctgtaccatgacacccacattccacattcctttgaatttgttctcaaaactattgaagacagaaggattggtgaccacgtaattccccattagtgcaatcgaaggaagatgttcggcacgggttacatttactttttgcttgtaaatctgtgtagccagttcgagactgcgtatctccggacgatttgcataagcggtagacatatcgaaatgagtatctgttgtgagtaacggaatatcttccatatcttcgtccgctaacgtaatgggagagctaagatcaatgccacatagttgacataacaacattcgggcaaggcttaatccgtcttccactttcgttagtgtcatttccgcttcatttacttttacccgtacggataaaccgtccgctttggttgctactccttcggcaatcatcttttccacatcgctgtccagttgctgcagaagtttcagatatccttccgccagtttctttttgtttaccagcgaaataacctgccagtaagcctggtcagtactcataattacttcctgcataccgccttggtgctgctgctgggctaactcttcggcgtactttgttattttgttgtaggcgcggatcttaccacccatatagagaggttgggtcagtgtgatagcaccggcatatacatttcttgtatctgtacggagggcatctactaatgaatttcctacttgatcgagggcaggtaaggcggcaccgagttctccgcttaatgaagatattaatggagcaagttcgggatgtgctgttgcaatctgtgtagcagcctgttgtatgggacctgccagattagtccctaatcccgaaagcgcagctttctgatctttatttaatagagaaaactctttttggtttctcatataggtcccggttgccgagaagttgggcaggtagttggtaaatgctgcttttctctcatagtgggccgcatttatcttttcattgctaatcaacaagtctttattgttggcaagggctaatgcgcggcaactatccaagcttagtaaagtttgcccttttactataaaagtcatacttagcagtattgtcagaagaaatagctttttcatcgcatcttgcatattaataaggtgatacttctattttaataacccgcttcttatgtaatttgtttattgaagtagtctgtttttttgaacttgttatcacgaacaataattgcataaacaacgatgcaaaagtatatgctttctttgaaagcacaaaatgaattagctttttttaataacgggctgttgtttgaaatattttccttccaacagctaatttgttatttgtttgttcgtttgtgtttccagttttatatatatttgcagaaaatgttacctgcaatcaataatacaacacatcatgaatattaaatggcttatcggagcgataagtgtgggattgtttatatcctgcgaaaatgtaaaagaggcacaaactgtcagtaacagttatccgtctgtttttcctgattatacgtttacggctataccttataatatagcgcctttaaatttcgaagtgaagggtgcacaagaaatacgtgccgattttgcgggtgaaggtgtcaatcttctgacagtcacgggtaagcatgaggttcgtatcccgaagaaaaagtggaaggaaatgttagacaaactgaaggacaaagatctggaaatcacagtgtccgtatggaattcgtcttctcctgaaggggtacgatataaacctttcacggttcgggttgcatcggatgctattgacgaatggattgcttatcggctgatagaaccgggatatgaaggttggaatatgctgggtatttatcagaggaatctcacttcgttcgaagaaaaggagattgctactaatcgtgcggataaaagtaagtgcatgaactgtcattctttcgctaattattctccacaacaaatgatatttcatgtcaggggagaaggtggtggcactgctttatggaaagatggtgaattgagcaaactaccgttggagacaaccggtcccaagaaaagcggaacctatccgatgtggcatcccaatggacgatatatcgtgttttcttccaatctcacccgtcagtcttttcttagtgaaggtgaaaaggcgctggaagtgtatgatcttcagtctgacttgattttatatgacactcagaccaagaaggtactgacggataaacgctttatggacgaagcacattgggagacatttcctgcctggtcggcagatgggaaatcgctctattattgtggcgctttacctaagaatatgccaatagattaccaaaatttgcattatagcctttgcaaagtcgattttgatgaggcaaccggaacgtttggcgaacgaattgatacgatatacaatgcggagcgcgatggaggcagtgtctcttttccgcgtttgtctcccgatggacattatttgctgtacacgaaagcggcttgtgccactttccctatttggcacaaagaggcagatttgaaaatgctgagactatctgacggtgaggaactggacgttgaaattctgaatagtgccgagactgagagctatcattcctggtcgtcgaacggtcgttggattttgtttagtagccgtaggctagacggccgctatacaaggcttttcattgcttggatggatgaaaagggaaacatacataaacctttcctgctccctcagtctactgttgaacataatgtgttacgtacgaagtcctataatattcccgaatttattaagggggaggtgacattgccacagaaacagcttaatgctttattcttccctcaaaaataagatgctatgaagaagatatttttatttcatttattactggtctgtccggtaatttttctgatttggtatattgtctttcctaattatctttggttactggaaggaaactcttttttctctttcacgcctgattttgccggtatacaactttcccttccttctgattgggcgcaatatgtaggggcttatctcctacaattcttccggttccgtacaagtggagctttggtgcaaatgttgtttgtgcttattgtgttgctttcagccgattgtatcatcgcccgtttgacgcgcaataaaggattgttgtggctttcattcattccggttatctggtttatgagcgggcagtttgctgatgtgcttttggtccgttcgatgtggtggtgtagcatttctgctgtgttagcgttgcttgtatggttgcttacgatccgaagaaaggctccggtagcatggggagaacgttatttcttttcttctccttttttcacttacatcgtgccttgtttactgttgggtttcatcgtttaccgtgaagtgaccgatgaaaagcagaaggaaacggaattcatttctcgcatagaccaccttgctgagaatagaaattgggatgccattttacagaatgtgactccggaaatgacgaaaaagaattcttctttgttgcgctggactttgttggctctttcagaaaagggacagttgccggaacggatgtttgcttatggagtgaccgaacctgcctgtttcttttatgaacgtgtagacaagcaattctgtcgtaattttaatatgcagttcttccgtgctttggaactggataacgaattgcttcataatgctttccaggcaggaattctttctccctacgggaacagttttcgttctatgagagcaattgtggacgcttgtgtccatcaaggtcgcaatcgaatgcttgccaagtatgtagaagtaatgaagcatacaagttgccacacgaaacaggcacagttgctgggtgaatacttggcgtcagccggtgtggaagataagattaacagtggaaagaatacgtctccgttttttataggtgcgcatccttttctttcggatatggcacgtatggtagaccgttatcccgaaaaccggaaagctgtggattatttgctttgcgggctgttgatatcaaaagatgtggataagttctataaggtattcagtttgttgtacaagccttttagcgtcaagcttccccgttattacgaagaagcgttgctggtactggcaacacaacatccggacatattgcgtcgctatccggtgggacaggaggtagtgaaggattttaattcatttcatgctttgttgaaaggaggaacgatgaatcagaaaatgttggaaatcaattaccgagattcattttggttgttctattactgtatgaaggcagtgaagaaatcggcggagaactaaaaagagaaagttcctattcttaccatgtgtctttctacaaagaagacaccttttaaaagaataggaactttcttgcttatataaagttaaaggggatctttagattaaagagcacctacttctttcaaagcagcgttagtgccgtgaacagctttagcgctagcagcaaacttagctttttcgtcttcgttcaggttcagttcaacgattttttcgatgccattcttgcccaggataacaggaacaccgatgcaaagatcagattcgccgtattcgccttccaggaatactgaacaaggaaccattttcttttggtcgtgcaggatagattcaacgacgaatgctcctgctgcacccggtgcataccatgcagaagtacccagcaacttagtcagtgtagcaccacctaccatagtagcggcagcaacttcttccaatttttcagcagaaatgaagttagctacaggcatacctttataagtagcgaaacgagtcaaaggaatcatggtagtatcaccgtgaccaccgataaccataccttctacttcgttagcattgcaaccgatagcttgagacaagaaatatttgaaacgagagctatccagtgcaccacccatgccgataacacggttcttcggcaagcctagagctttcaatgccaagtaagtcattgtgtccattgggttagagataactacaatgatagcgttaggagaatatttcaacaggttttctgctaccgacttaacgataccagcattaacaccgatcagttcttcacgagtcatacccggtttacgaggaatacctgaagtaatcacaacaacgtcagagttagcagtctgagcataatcgtttgtgcagcctaccaatgtagagtcgaagcccagcaactgagctgtctgcatcatatccattgctttaccttctgatacgccttctttaacgtccagcattactacttcgtctgctacttcattaaaagcaagtacatttgcacatgtagcacctacgttacctgcgcctactacggttacttttgacataatactatatatttaaaaagttgataatttgttttatctattttgcgcgacaaaattacaacgataatcctgattaaagaaatttttccgtaataattttagttaaagaaaatacctcattctatgttactctgttacgaaatgattacttttgcggcggttatcaattaacacactgaactatgaataaaaaaagtcttcttattgcagccgtggctattctggtgatagctattattggtattacttatttgttatttactgagaaacaagctaaccgggagttggtacaggaatttcagttggataaagaagatctggaaaatgaatacacccgttttgcacaacaatatgatgagttgaagatgacgatctccaatgattctctagctcaattgctggatcaggaacagttaaagactcaacgactgctcgaagaacttcgtactgtgaaaagtacgaatgcaacggaaattcgccgtttgaaaaaagaattggctactttgcgtaaggttatgattggttatattaaccagattgactctttgaataaattgacggaacagcagaaactggttattgctgatgtaactaagaaatataaccaggcttctcaacaaatcagtaatctttctgaagaaaagaagaacttgaataagaaagtgacattggctgctcagctcgacgctaccaatattcgtatagagccacgtaacaagcgcggcaaagtagcgaagaaggtgaaggatgtagtgaaactggctatcagctttactgtcgtgaagaatattacagccgaaaatggcgaacgtactatttatatacgtatcacaaagccggataatgatgtactgaccaagagcgcatccaatactttcccttatgaaaaccgtacattggtttattctatcaagaagtatattgaatataatggcgaagaacagaatatcaatgtattctgggatgtagaagaattcttatatgccggaaattatcgggtcgacatcttcgaaggtggtaatttgataggctcgcagacatttacgctaaactgataggcttataaatacacttggtaaaacgggtgtttggttataataaaaagacgtatgcaattgctcagatttataggagcaattgcatacgtctttttatattataccttatttgtatagatgtggctgagttctacattgataatttttctgttataagtggtgatagtgatattctattttagcgtaaatacgccaaaaaatgaaatatttgtgtcttttgtgtggtgccgcaccctttttggtgtaaaagtcttatttttttctttattcatagacggtttgcgataaataaactctatacatttgccattgctctggcaagagaccataatttaatatgaatgaaataacgtttcttaaaactaatgcaatggtaaatttacaaatgaaacgaggcaataaatgcaatggattgtctcatgaaaaacaacaaatgaaggagaagaagtttctattttcccgcatagtcggtgttctcctgttaatcttaatctctacattaccgcattctgttgtttttgcaaatacagaaatgcctaatagtattgttcaagctacattacagaacttaaagggtaaaattgttgatgcgactggagagccacttccgggagctacggttcagttaaaaggtagtactaaaggagtaatatctgatatggacggtaattttgagtttagtaattgctcggcaggtagtattttaattgtgtcttttgtcggaatggagacgaaagagattaaatacaatggagaggatttcctgaaaattacattgaaacctaaaacagacgaactggacgaagtcaccgttgttgcttttgcaaagcagaaaaaggaaagtgtggtagcttctatcactacggtaaaacctgcggaattaagagttccaagtagtaatcttactactgctcttgccggtcgtgtcgcaggtttaatatctttccaacctagtggagaacccggacaggataatgcgaatttctttattcgtggtattacaactttcggagcggatgccaaaaaagatcctttaattctgattgacgggatagaattgaccacagatgacctggcacgtctgaatacagatgatattgcagctttttctataatgaaagatgcgacagcgacagctctttacggggcgcgtggagcaaatggagttattttagtgactacaaaagagggaaaagaaggaaaggtttctgtcaatgctcgtgtagagacctctttctcatctccgacagagcgtgtaaagattgcagatccggtcacttatatgcgtatgcaaaacgaggcaattaagactcgtgacccgatgggattagccatgtattcggaagaaaaaataagcatgactgctgccggacgttatcctcatttatttcctgcgatcaattggtacgatacaatgttgaaggatgtgacctccaatcaacgagcaaacgtcagtttgagcggtggtggtccattggcgcgctattatgttgcagctaatatatcccatgacaacggtaatataaaagtagataaaaggaataactacaacaataatattagtttgataaaatatgccttccgttcaaatatcaatctgaatctgacaaaatcaacggaattatatttgaaattaagtgcttcattcgatgattataatggtccgatcgacggaggtacggaagtatatcgtatggctatgcaggctaatcccgtactatttcaaccttattatgaggcagatgagcagtattcgaacgtaagacatatattatatggtaattatggagacggtaattatgtgaatccgtatgcacaggtacagagaggatatcgtgagtacagtaagaatacgatgcttgcccagttaggctttaaacagcaactggatatggtaacggaagggctttcggcacgagcttttgtaaatatagaccgttatgccgagttttccgcaagacgtgaatggactccattttattatggtatctcaaactataaattattggatggaagttatacgttgaaaagattaaagagtggaagtgatggcttgaactatgccgcaggggataggtatattaatacagccttttatctggaagccgcattggaatattcacgtatgttcaaagagaaacatagtgtaaatgggttgtttgtttatacaatgcgtgaagccaaacagtccaatccgtacataaccagcttgcaactgtctttgcccaatcgtaacattggttttgcaggacgtatggcttataattatgattaccgttatatgttggaattgaactttggttacaatggctccgaacgttttgcaaagaataatcgttggggttttttcccttctattggcgcaggatggatgttatctaacgaaaagttctttaagcctttacgtagcatatttgaccagtttaagattaaggctacttatggtatggcaggtaatgatcagattggtaataatgaagatcgtttttattatatgtcagatgtaaataacggggctgacaatacagtgaattggggagaaagattggactataatcctggcggcggcttttatgtaaatcgttatgcaaacgaccagattggttgggaaaaatcatataaattgaatacaggcattgagtttactactacgtttgggttgggaggaaatatagaatatttccatgagaaacgtgataacatattattaggacgtacaattccgtcaacgactggtattacccaaggagtaaaggccaacttgggcgaggcaaaaggtagtggtattgatatggaaattaattatgataaaattatcaacaaggatttctggctacaagcccgtggtacatttacatacgcggcgagtgaagttttggtatgggaggagccggattataccgatactccatgggtttcagctgtagggcaatctatcggacgtattggggggtatattgccgaacgcctttttattgatgaggaggaagtcaaaaactctccggtgcaatttggtgactatacagcgggtgatattaagtatagagatgtgaataatgatggtaagataaatgagttggataaggtaacaattggttttccgaataccccgcagataaattatggttttggagtatcagcaggatataagggagtggatatttcttgtttctttcagggatcggcacgccagtcattcttgcttaatattccggagataactccgtttcataatattcgcggtgacggattgattggtgcgaatgtaatacttcaggatattgcaaacagctactggtctgaaaccaatcctaatccgtatgctttttggcctcgtttgcagaatggggttaatgaaaataataatcagccaagtacatggtggttgcaagacgctggcttcttgcgtttgaaatcagttgaaatcggttatacttttccacaaaaagtgttgaaaaaactaggaatgaataatttgcgtttatattgtagtggtacaaacctgttgtgctggagcaaatttaaaatgtgggatccggagttggctggtagtggactgaattatcctctccagagagtttttaatgtaggattgaatcttgggttttaattaaataatactatagaaaatgaaatcaatttataaatatatagccggtatatgcatgatattatcagtttcatcatgtaactatttggatataatgcctgatgatactgtgacagtgaacagtatgtttgccgaccgttatactgctgaacgttatttggcgacttgttatcgtggattaccgcgcttgggagagaccaaccggaatcccggattggtgggagctatggaaatggtatacaatactactactgatatggtaaacaatgcttgtatgagattggctttggggcaaaacagtgcttcttccaatgttattgattattggcaggggactgacggctgttatgcctctatccgtgtttgtaatgattttctggaaggcattgatggagtgactgatttgcagcagtaccagcgtgagcgaatgaaagcggaagtaaagctaataaaagcctatctgcatttttacctgattaaatattatggtcctatttgtccgatgcgtgttaatattgcagtggatgaatcgactcaaggggcgcgtgtatatcgtgaaaaggtagatgattgcttctcttacgttctggaattattacaggaggtaatcgatagccaagcacttccggtgattattgctaatagggctacggagttggggcgtttcacgcaggcagcggcttatacattgaaagcaaaagttttattatattgggcaagtccattgtttaatggaaatacagattacaatgactttttagatcataatcaggaacctttcttcaatcaggttgaagataaggggcgttggaatttggcggcagaagcctgtgaggatgcgataaatgcctgtacacaagcaggaatccgcttatatcaaaaagaggattatgttacatcacagttgctgacggatgaaacaaagttagtcaatgccattcggaattctgttgccgaaccatggaactgtgagttaatttggggatgtacccgttcattgttagatcccggcttccagagttcgtgtcttcccagattggaggatggaggtacggctgtaacatctgctactattagccttccattttccacagttaatgctttctatacgaaaaacgggttgcctgtcgaacaggatgcaaactattataaagatggaatgtattttcctgtaaaatactctaaggacaattctgagtttacagagcattatgattttgattataactatcgttatgtgattgaaaatgaaactacggctggaatgaattttgaccgtgaacctcgtttctatgcttcagtaggttttgatagaggagtttggtatggcaattcatatagtgatccggctggtgaccaaagtgagtcgcaagctgcatatagatatcccagaaatcgttttggtgaattttcctcggtttggaattccacttggtataatgttactggctattgggcaaagaaactggtcgctttacgttccgcttttacaggaagcgataatgtctctttctattctgttccttttccggatatgcgttatgcagacttgttgttaatggcggcagaagcatggaatgaagcggaagaaacgcctaacgagaaagtatacgattatttggaccaggtgagagaacgggctggattggaaggtattaaagaaacatacgctaaatatgcaagtgcgcaatataaagactatccttcccataaatctcagatgcgggatattattcatcgtgaacggcaggtggaattgtcatgtgagggatcttactattgggatactcgtcgttggaagacagcagagaaagaactgaaccgtattgtacagggctggaatgttttaaacggagagactgcggaggattattatattcctactaatatatataaccagcaatttaccctcagagattatttcgctccgataccggatggtgatattatcaggaatcctcagttagttcagaatccatggtggtaattattaaattatgagtattatgaaaaagatatatatattaattactttgtctttaatgatattggtctcctgtacggaaaagcgcctggaaccaattacagagagcttagggatgccgaccgtaccgacagaaatcagtgttgaaccagtttccggaggagttgtcatatcatatcgtgttcctgatgtagaggatattttgggtgtgaaggctgtttattcattggctgacggaaagcagcgcgaggtaatttcgtcctattataacaatcaagttcgaattatgggatatgacgatatggaagagcatgaagcggtgttatatacagtgaatcgtgcaatggaattatcagagcctgttactgtatcttttactcccttagaatcttctatcagtaaggtttcgaaaagtatgaagattatacgtgattttggcggagctcaatacagttggacgaatgacgagcgtgagtcaataacgatggaaatgctgactaatgatgaatcgggtaacatggttgctatgaagataatgacaactgcttcaaaaacggggacttatgctttgagaggatatgatattgacccgcgttggtttgcagccgttgtgcgtgataattatgggaatgtgtcagatacgatttatccccgtaatgaatcgggtgagaaaatgcagatagctcctttgtatgagcaaaagttgaataaatcggcaatgcgagtaatgatattaaataatgatacacctttcaatgactttggaggtagtaatgcgaatatgattgatgataatctggagactttcggacatagtagtaacggaacgatgccggcttctttcactattgatttgggagagcctgtaaaacttagccgtgtggttctttatcaacgcaacaatgaaccttatggctggggaaatcctcgggtattcgaagtttattattccggcagtgaaccggaacgaagcggggattggggacaatggactaaattattggattgtgaagtaattaaaccatctggtatgccgattggtaccaatacagatgaagatatggaggcgcttaaagaaggacatgattttagttttgatgttgatcaggagccggtacgatatcttaggtttaaatttataaaagtgtggaccagttcaaccttctgtcatcctgctgaatttacgttttatggagatcctaatgtcgaataaaatattgatgataatatgaaaagaatatatgataatttgttattattgttgttgtgtctgtctggtctctgttcttgtgatgatgtgatggatacacataaggcctttattcaaggtggggaaattatctatgcccctatgcccgatacaatattttttgttgccgggaagaatcgggtcgagctaaactatgaaatatcgaaagcgccgaatgtgaaatttatgaatgtttattgggataatggtgcggggtcgcttgtggttccgttggaactttcttccggaacagaaaaaggaaaggtaattttagatgatatggaagaaaagtcatacacgtttactgttgaattgcaagattcgtatggacataaatctctaaagaccacaggaataggctcttcgtatggagaaacatatcaggctagcctgtctcaaaggcgtattagtaggatggcaacaagtgataatggagggattattgagtggaatattgcttcggaagatttgatatatactgaagtgaaatatacgaatgtagctggtgaagaagtgttgttggagatggatgccaatcaaaacgctcttgattgtccgggagcgaaaccgggaggaactgtggaatttcgctctgcttaccttccggaagaaaaatgtattgatgttttctatacgccatgggtacgttcggatgaattgggaatgatatttccgcatgtttacacaatggaagaagccgataggcaaaattgggaactgttgtactatgataatacggaccccgaagaaggaaggcctgagtatattttggataataatccttcttcctattggcattccaattatcgggatggccagcagaagccctatcctttcacctttgtcatagacatgaaggatgaacttatggtaggaaaattgggtgccatgtctcgtgagaataactactatacaaaaggcatcagttattatatctctgacgatgacgagttcaccgccggaaatccggacggaaatcagtggacctatattggtgagattgaactgttgaaacaaaatggaatgcaatggagtgaagtcataaccagtactttggaaaaacaggtgaaaggacgctatttaaagattatatgtaccagtggacatggagcatcccatttgggggctattgcagaaattacggtacaaaaagtaaccgcaatagacggggaagatttgtaactaattggttgttaaatataaaataaagtatgatgaagaaaattctttttgtgacattggtgtgtatatggagtgtagtctcgatgtatgcatgggaccggaatatcttgatttcgactaaaaatacctcgttgctgtttgcagcacagaacgatggagatttgcggtttgcatattacggtgataagataactccggatcaaataaatcaaatccacgatatatgggcaggtctgaacagacctgcatatccgacgttcggttcggaatattcgtcggctacggcacttcaggtagtgcatccggatggaaatatgactctggatcttatcgtgaaagatgtaacgacaaaaaatgtagaaaacggagaacagacggtagtgactttaagagataaacactatccgtttgaagtgaagatgaactataaagcctataataactcagatatcatcgagatgtgggcggagatctcccatgccgaaaagaaagcggttgtcttgaaacggtttgattcgggatgtatgcctatccgcagaggagacgtatggatttctcatttgcacgggagttggattgcagaatcagatgttacttccgagccattgaagccgggcatgaaaacaataaagaatatggatggagcacgcaatggtcagggagaccatgcggaggttatgttctctctggatgggcgtccgcaggaaaatacggggcgtatgattggagccgccttgtgttggagtggaaattacaaacttcgtattgatacggataataattattctcataacttcctggcaggaatcaatgatgaagcatccgaatataaactggaaccaaaggaagttttcgtaacccctaaacttgccttcacgtatagtgaagaagggctgagtggcgtaagccgtaattttcatcgttgggcacgtaacggtcagattcatggtggtaataagcttcgtgacattctgttgaatagttgggaaggtgtctattttgacattgacgagcagaaaatggaccagatgatgggagactttgctgcaatgggcggtgagttgtttgttatggacgacggttggttcggtgacaagtatccgcggaataatgaccattcttcattgggcgattgggtggtgaacaaacggaagttgcctaatggagtggatggtctgattgcgacagccaagaaacatggaataaaatttgggatttggattgaaccggagagtgccaataccgtcagtgaactgtatgagaaacatccggattgggtgttgaaagttcctaatcgtgatcctcgttatgggcgtggtggtacacagatgctgttggacttgtccaatcccgaagtacaggactttgtattccaggtagttgatgatttaatgaccaactatcctgatatcgcctatatcaaatgggatgctaatgcgtctttggtgaattacggatctccttatttgcctaaggacaagcaatctcatatatacattgattttcatcgtggattgcagaaggcggtagaacgtattcgtgccaaatatccggatctggtgatgcaggcttgtggtggcggcggcggtcgtgttgattatggagtgatgcccggattcgatgagttttgggtgagtgataataccgatgcgttgcagcgtatatttatgcagtggggtacctcttatttctatccttctatggctatggcacagcatgtcagtgcttctcccaatcatcagacgggaagggtaatccctttgaaattccgttttgacgtagctatgagcggtcgtctcggaatggaaattcaaccaaagaccatgtctgacgaggagaaagaattctcgaaacatgcgattgctacttataaggaaattcgtccggttgtgcagttcggcgatttataccgcttaatttctcctttcgataagctgggggttgcttctttgatgtattgtactccggagaaagatcgtgctgtgttctttgcttataaaatcgagcattatatgaatcaggtattacctcgtttccgtatggccggactggatgcgaacaagaattatcgtattcgtgaactgaatttgccgcaaggcgagaatccgtgttatttgcatgacaaggttgtagcaggtagtattctgatgaatacaggaatggaagttcctttgggggcagagtatgcgagtcgggtgtttgaactcatagaggttaaatagaagagagtaagtaaatgaatggaaagcctcggacgatacttcgtccggggctttttaagtaataccggtttaagttaggaatagtagacgtatgaaatacatgatataggcacgaaactgaacataccccgctaaacatatcatatacaaccgctatacatctgttatccggtaggtattgttctgtcaggataccgatattgctaattcgccacggccgtggagagtattcgtcacacccgtggtaatatctcgccacggctgtggagagaactctccacggctgtggcagactaactaaatcggtactctaacctaatcataccggtattccaatctaactataccggcttcccttcctataaagtcccacttaataaaccggcaggcaagttacttgcctgaatataaactgatagccgttcggttatttgatttccaataaatctccggctttcataggtatagttatgatacggtgagtgtcaggaaccgttttgattgtttttccattgagcaggattctgtacggcttgtttttgttttgaggtatttttatggagaaagaatttgcagcggtagctttaaccgaagcatagttgatgacagagttgttccagtcagccgagacttccgcgccaccacggacacataatcctttataacttcctttattccattgttccggtaagcaaggaagaaactcaatatatccttcatggctttggatgagcatttcaccgataccggcagctcctgctgcatttccgtcaaagatgaatatgtcataaggtgctcctgcgataccagccggagatatgctcaacagattctcacgggcaaaatcaccaactaaaataccgatactcttatgcgcgttagcagcatctttgagacgggcataaaaacaaatcatatttgccctactccattccacatcctcccagcccggtgcgctaagcctgtcttctatcgtttttcttgcccctgttgctaattccggagtttttgtcaaagatatctgattgaaagggtataatgcgagcaaatgggaagtgtgccggtgattgggactggcttcttcatagtcttcgtaccattcacggatcgctccgttggcacgtaaacgaattggagggaacttacccagtgcattcttcagactatcgctgaaggctttatctgtattaagtatttgggcagcttgtatgcatgaacggaatatttcataagctaaaacgcgatcacaggtaggcatcattgaggcacataaggtggtgccctgataacggaaattattttcaggagaaatgctggggcctgtgaccagatgaccgctgttcgggtcttccgtcatatagtctaacaaaaattccgcatttccctttaataaaggataagctgtcttggctagaaaatccttgtccaacgtatactcatattgactccagagatgtgaggcaagccatgaactggctgtaggaaaaagtccccagcctatgttgcttgaaggtgcggtacatccccagatattggctgttgtatgcgctgtccagcctttgcagccatatactatttgtgcggttttggtgccgtgtatggataagtctttgatatagctgaaaagtggaatgttgcattccggcaggtttccgatgttggaaatccaatagttctgttgggtgtttatatccagatgataatcgttggtccaactcatgttgcatgccagattgtcgttgaagaaaccttgtaatgcgacgggtagcggagagttctcgcgtgaagaagcgagtaataaataacgtccgtattgaaagaaaattgcatcaagcccgggatcggtggcgcctgatttgatacgttcccaccttttgtcagtaggcagcttatcgtaccggttgttgccgagagtcagagagacgcggtcgaacaaaggagaaaagtcttcaatgtgcctgcgcttgagttctttatattcttgtgcctctacctccttaattgtttgctcgcataattgcttatattgatcattcttgtagttggtacgtacatcaataataatagtcagttcatcagcattttgtacggaaagtagtcccggtttcgtctgaaaagtacctttggaagcaataacggatattttacctataaaggaaaccccaccgggaccttgttggggaaaagatacatctccttcaaaagttatctgctgatcttttatttgcacagaagcctcccgtagcagatcaagggacaagtcggctgtgatacttccttttttatcggcggacgtgtggaggattattgcgtcgtccggattgctcgcaaaacattcacgagtgtattgtatagctccaactttataagaaactgtactcaatgcctgattcatattcaatgaacgtttataattggttattttcccttcgggatatgtgaaacttagtttcaagtctccaataggcaaatgggtaccgaacgaatgtagtagtcctctcaggttctccccggcaatctgattcccttcaaccagttttccgtcgaagaataattgccgtaactccttcatcttttctttcccgaaaggttgttcttggtgcggatcgtgagctccggaccacatgctggattcgtttatggcgataatctctcccagtactccaccataaaccatagcgcctaagcgtccgtttccgacaggagtcgatttcatccattcgtccgcaggctggtcataccataattctatgggaggattagagcctttggccgataggattgccggaaagacgaatactgctattatacaataattacggataaatgtagatttcatgtgctcgatagttttcattgatacataaatttgtgattgaacatacaaatgtagcctgtttcggaaaacggtcgaatcacaggtgcgtcaataactaacaaaaatgacgcaaatataaatttgtaccgtttaaaatgcctatatttcgtgcgtttacgtatttttgtaccgcaataatatgaatgatatgaaaaaggcactgttgactttattattggttttattacatttatctgctatacccaataattattctagctactctttcttgcatataacaggtgacaatggactgtcacaaagccatgtaaaggctatcttgaaggatagttatggttttatgtggttcggcaccaagaatgggctgaatcgttatgacggtacttctattttacagctcgactgtgatgactacgtggcaaagaaagggaatcacaatatttcagctctttttgaagataaagataagaagctatgggtcgggactgaccgaggagtgtatttatatgatatgatgctggatacatttactgctttggacgataaggctgaatccggtgccagtctggataattgggtatctaatattgtagccgattctgtggggaatatctgggtggtgataccggaccagggagtgttcagatatgccgggaagaaactatacttttatgagataatagaccggaataactttaagaaagagactccggattgcattcatgtcacctcgaagggagaagtctgggtgggaacctggggcgcgggcttattccgttatgacacagcaaaagataaattcgagcagtacaaggcagataaagacaataattctttgacggcactctctatcaattcaatatgtgaaagtgacggttggctgataatggctatccagaatgggcgtattatgaagtatcatccccggcagaacattcttcgtagtctggatcttgcagatgtcagccatacatttgtcaggaatgtttcaatgcatggagatgaaatctgggcgggaactcatgaaggggtatatattattaatgagaagaaaggtacagtggtacatttaaagtctaatctcattgagcctttcagcttgtctgacaatataatatatacaatgtatgaggatgatgaaggtggtatgtggctgggcactatgttcgggggcgttaattacttgcctaatcgtgggttgatttttgaaaagtatgtccctttgaataccgggcaatcgttgagttccaagagaatacgcgaactggttgaggataagaaagggaatgtatggatcggaacagaagacggaggcgttaatattctatctagatccggacaaatcacccggatgaaatcaaatgataaggaacagcgaaaccggactattctgaatatgtccatatatggggagaacatctattgcggattgttcaaggagggacttgatgtgataaaacctaccggggaagttgttcattactctgacaaggctctgaatattgaagagggaagtgtctgggcattctgtatcgacaagaaaggctgcaagtggataggaaccggttccggtttgtttatggcggataaagattctttcttgttttcgaaagtgaatgaagtaggatatgactggatttttgacatctttgaagatcgtgaaggtaatctgtggtttgcatctatgggtagtggagtctggaaacataatccgcaggcgaattcttttgaaaagtatatcaataaggaaggtgagcctaacagtttaagttcgaactcggtcagctcggtcatgcaggacagcaaagggcgtatatggctctcgaccgatagaggtggcatttgccggtataatgcagagacgaatgattttacttctttctctataaaggaagggttgccggatgatgtggcttatgaaatattggaagatgatgctcataacctttggttcgggactaataaagggttggtgaaattcaatccggagacgaaagatattcatgtctttactaccaaagacgggctgctggggaaccagtttaattataagtcagctttgaaagtaggcgacggcaggtttttctttggagggattaatgggcttattgcttttgacccgaatatctcccggcagcagttagctcctccttctcctatttatatctcaaagttcagcatttacaataaagaaataacggtacatactcccaattctcctttgaagaagaatattgtaggcacggaagagatagttttgccttataatcagtcgaatatcagttttgatattgctttgctgagctactctaccacaaaatcgaatcagtactattaccgtttggacccgttggacaaagattgggtaaaggcgattagcaatcagaatatctcgtatgccaaactgtcgccgggaaagtatgtttttaggatacaggccgataatagtaacagtcagttggctaaacgttctttgtctattgttattttacctccctggtggttgtcggtatgggcgtatagttgctacgtcttcttcttcatatcttctatttgggcttgtttcttttggtataagcgacgtaaggaacggcaaatgacggagagccagaaactgtttgaaatacagaaggaaaaagaactttacgagtcgaaagtagagttcttcaccgaaattgctcatgagatacgtacgccgttgactctcattaacggtcctttggaagtgatccgggagatgcattttgaagatgtaaaactgaacaagaacctgaatgtcattgcgcagaatacaaaacgtctgttggatttggtcgctcaactgctcgacttccagaagataggagcgaataaactgaaactcaaatttgaaacggtagatgtaacgtcgttattgaaagaaatctgtgagcgttttgaacctactatacaatacgagaagaaggagttgtctctccaaactccggaggaagtgatgacagcggtcgttgataaggagtctgtcacaaagatagtcagcaatctgctgaataatgcattgaaatatgcgaagaaagaaatacaggtgaagttggagaagaaagatgatagtctgactattcgtgtggtaagcgacggggagaaaattccggaagatatgcgcgaacagatatttgctcctttctaccgaatggaatctaatatgcaaaaggcgaaaggtattggaatcgggttgtctttggctaaatcattggctgctttgaataaagggaaactgtatttggaaatggcggacgaagtatacaacacattcgtgctcgaacttccgcttagtccgaccgggcaggtggaacaacagcaacaggcggtggatacggtgccggggatattgccggatgacggtttggtggagaatgaagaaatagataaatatacgattctgctggttgaagacaatgatgatatgttgaacttcatactggaacgattgaaggagaattttatagtggaagtggctcatcatggtcgggaagcattggatatactgagagataaacgaatcgatttagtgataagcgatgtaatgatgccggtcatggacggctgggaactgtgcaggacattgaagtcggatatggaattatgccatatacctattatattcctgacagccaagaatgacttggatagtaagataaacggcttgaaaatgggggctgaggcttatgtggaaaaacctttctcatttaattatctgaaagttcagattttgtcattgctgaataaccggagaaaggaacgcgaagcattctccaaacatcctttcttccctgtgcataacatgcaggtgaacaaggctgatgaagagtttatgggcaaagttattgaaatcataaacgagaacctgacggatgagaatttcaatgtggaacgcatggcagatatcttgtgtatgagccgttccggactattgcgtaagataaaaatgttgttcaatctttctccggtggatttcatccggttgatacgcttgcggaaagcggcggaactcattcagacaggacaatatcgtgttggagagatctgttatatggtcggtatcaattcgccctcttattttagtaagttattcttgaagcagtttggtgtgtcgcctaaggatttcgagaagcaaagtctgggcgggaaggaaaagattgatattgacagctatttaaaaatgaaataaatgaagacaaagatgtaatatttgcggatttgtggcggattatccgcctgtttgcgtcaatagttatattttatgttctatttataggaggactcttcttctgcatcgtttaaatttgcagtgttttttaatactgatattatgaagaaagaatgtagaagaatgtttctttgtatgtttctgttattggcggccgtccagttttcgggatgtagccggtctacttcagaatgtttaaaggtaaaagactgggagattatttataatagtcggtccgggggagttgatatttataagaattcattgcctctttgcggttctgtttattcttcttttaaatatcaggagaagctgataaagtcttgtgattatcctaatcaccggatctcttcccggaagtatgaagatgagtttggaaaagggtatatatatcaggttgtctgtacggattctgttcttcctatgcttgttcagaccttttatatctatccggattatgactatgtattgactgactttacaatagaggacgatcaggaattatcttccaactatatggctccgcttattattgactcactggcgaatggctcttttctgtggaatgcggatagccgtgtcttgaaagtaccgtttgataatgataaatggggacgttatcgttcggtgcccttgcctttcgaacaactaacgagctatgaagtgacggctcttttcaataatgaagaacggaatgggatcatagtcggctcggtagagcacgatacatggaagacagcagtttcaataggtaaaagttcgctatataacatggggagtttatgttgctatggaggtgtggcagatgagcagacacgagattccaaaccccatgggagtcttgtgggacggcgtttgaagtcgcccaaagtctttatcggatacttttcggattggagggacggactggaagcatacgcgaatgcgaatgctaccataactcctccccggaaatgggagggggctgttcctttcggttggaatagctggggagtcttgaagtttgatttgacttatcaaaaagcggtagaggtttcggaatatataaaagaccatttgcaaaaccggtcttttgtcagtccggcaggcacagtgtatgtaggactggattccggctggaatagtttcacagaacagcaactggcttcttttgtgaagatatgtaaggataatgggcagaaggcgggagtatattggacgccctttacggattgggggcgcaatccggagaaagtattcgaagattgtcccgaatacaaatacaaggacgtgtatctttatgcgaatggggcaccacaggaactggacggagcttatgcactggatcctactcatccggcggtagaggctgccatgaaaaacaaatcggatttgttccgccgggtaggatttgagtatgtcaagatggactttatgactcatggagcaatggaagcggatcaatggcattgtgatactatccggacaggaatacaaggatataattacggaatgaagctactgaacaagtactttggggatatgtatatcaatttatctatatctccggtttttccttcccagtatgcacagtcacgacggatagcttgtgatgcctggaataagataaaagatacggagtatacgatgaacgccgtatcctatggctggtggcaggatttggtctatcaatataatgacgccgaccatattgttctgaaagatgcgaccgaaggggagaaccgcgcccggataacttcagggatcattacgggattatatatcttgggagatgatttcagtgttgatggagacgcgtcggcaaagagcagatctctcagtctgttgactagggaagaaataaataatgttgcgacgggagtcgcgtttcgtcccgtagaggggaatggagaggcttcggaaaaccagtttgtgagactcaatgaagacggaagctgtgattatgcagtattcaattattctgatgaagaagtagaaggaacggtgcctttggataggctcgggttgaagacaaataaaagatatacagtgaaagagctgtggagaaaccgtgaagaagaagtcggagcaagcatgaagtatacaattccggctagagatgtcttattattcagattctataaataaactaaacactgtcttactatggtgcgattttctatctttcttttagtgatactgatatctgttaccctttccgcacagaagaaaacaatgagctggggagatcaggggaacgggacgtacgttaatcctattttgaatgcggattactctgacccggatgtgattcgggtaggagagaaatattatatgatctgttccgattttcattatttgggtatgcaggttctggagtcggacgatatggtaaactggaaagtgatttctcaaatctattcccgtttttcccatgatgactggaatcataacaagagatacggagccggttcgtgggcaccctctttacgttttcatgataataaatattggatgtttgtctgtactcctcatgaggggctgctgatgagctatgcgacagatcctaaaggcccgtggtcgccgctacatgtggttgaggctgccgaaaggtgggaagatccttgtcctttgtgggatgataacggagaagcctatttagggcgtagtcaatggggaggagggcctattatcgttcatcgtatgagtccggacggcagaaaattgttggatgaaggagtcacggtatataccgggccggttgcagaaggtactaagttctataaaatgaacggatattattatatcagtattccggaaggtggagtgagcactggttggcagaccatcttgaggtcaaagaatatctatggaccttatgagaagaaagttgtattagaacaaggcactaccaatgtaaacggccctcatcagggagccttggtcgacaccccttccggtgaatggtggttctatcatttccaggcgacggaacctctggggcgcgtcgtacatcttcagccggtttgctggaaggaggattggcctatgatcggagtcgatatagatatgaacggtatcggtgagcctgtgcgaacctggacaaaaccggtcataaacaagacatctgatcggttcttaccccaaacggatgatgatttctcaacggaaaaactaggatatcaatggcaattcaatcataatccggatgatgaaaactggagcatgtctgaacgtaaaggctggatgatgattcattcgaccaaagcgaagaacctgcgtgaagcacgtaacatgatgacgcagaaatgtatgggatacatcagtgaggcggtaacggagcttgacatcaagcaaatagccgacggacaacgtgcaggaatattgggaatcggcaatgtattcaatggagcggggataacacgtatcgaaggaaaaaattacgtatatttggagcagaatggggtagcaaagactatttgtgaatggaagggcaacaggatatttctgaaggctcgtttcaatgctccggagaatcttcatcaattctattatagtgcgaatggaaaggaatttacggcctgcggtgatttatattcgttacatagtggagactggaaaggtattcgtacaggtatctactcctataatgtgaatgatgagagagggaaagtgttctttaatagttttatttatcacatggatgactttaattaatataagtaaaatgaaaaggagatttgtactattattactactgtgtattgttcatataggtgggtatgcgaagattactttgccaggttattttacggataacatggtactgcaacaacaaactaaagttcttattagcggacagtcttccggacaggggggcgttgaactaagagtgggttgggataaaaaagtgtataaggcggacatcggtacaagcggtgaatggagtatagaagtggagactcccaaggccggcggcccctatgatatagttttatctgatggtgaggagtgcttcttacataatgtgctgattggtgaagtttggctttgttcggggcagtctaacatggaaatgccgcttgccggctggggcaaggttatgaattatgagaaggaaatagcggaagccgattatccgtcaatccggttgtttcaagttaaaaaagaaacctcattgagccccaggaagaatctggcttctactatgggaggttggaaggaatgctctcccgcaatgattccgaacttctcggcagtcggttatttctttgcacgtaacctgtggaaagacttgaacgtgccggttggagtgattgattgtacgtggggtggtacccctgcggaaggttgggctagctatgatgcgatgaaaaagatactgggatttagtaaagaagtggaaaatgctcaggctttaaagtttaatgcagaactattgaggaagaaatatgatgaggatagaaaagaatggcagcaaggcctgaatgactctgacaggggatattcgggtaaccggagtctttggacgccaaccggctatcctgatgagaactggggtgctatgtctctgcccggatattgggaaaataaaggaatgagtaattttgatgggattgtatggtttcgtaaaacgatcgacataccggtggactggagtggaaaacagttaaagttaagattgagtatgattgatgacgaagatatcacctattttaatgggattgagattgctcgtggatatggatataattcaccacgtgaatatattgttcctgctgaagtggtgaaagtgggtaaagcggtcattacagtccgcgtttccgactttgggggagaaggtggaattcatgggcaaccggaagatttgtggatttcttgcggtgaagcggataagattccgttggccggagaatggagatataaggttggggtttctatgaaagaagttccgcgggttccgctatcaccggttgataatgccagttatccagctgcaatttacaatgcaatggtgaatccgctgatacattttcctgtgaagggagttatttggtatcagggagaagccaacgtgggacgtgcagctgaatatgcggacttgtttcagtcattgattcaggactggcgcgataaatggcagaatccggagatgcctttttactttgttcagctagccagttatctggaacgtaaggagatacagccggactcggaatgggccgctttgcgggaagcgcaaaataaagcattgcatttgtgtaatacaggaatggcagtagctattgatattggtgatgctaacgacattcatcccaagaataaacaggaagtgggacgccgtctgtccttacttgctttgcagaaaacgtatggcaaagggaaagtaacggatatcatgtcctataaggattatgtcgttgagaatgacaaagtccgtttgatatttgaaggtaatacgaaagggttccaaccctcagatctcttgaccggatttacaattgcaggtgcagatcatgtgttctatccggcaaaggcgcagataaaagggaatgaattattggtttggtcgccggacgtctccaatccggtagctgtgcgctatggttgggccgataacccggattgcaatttatatgatagaacaggattgccggtcgctcctttcaggacagactgttggtgattgcccttgctttattggtggatatgatatggctttgaatcaattctaaatgatgcgaaacgggaatacccctgtaatctgtttcttatcgtctgccgtccgccccccacatcattttactgcgaagcgtgtcaaagaaaatatgattaaagcgttttactactttgacactgtaatctgcccggcggatagtgagttgggtggtttctttgcacgtttcacttcggccgtcaatggcaacgaggaagttatggctgcggctttccacgtccaatgtgatttcccaatcgtctcggataacgataggacggacgttgaggctatgcggagctacgggagtaataacgacggtgttggaatggggcaccatgataggaccgcctacacttaacgaataggcggtggaaccggtgggcgtggcaatcaccagcccatcagcctgataagtgttcaggtatgcgccgttgatggctgtccggatactaatcatagaagaactgtcccgtttgagaacggcaatttcgttgagggcataaggggcatcttgcaaatgcttgtcgtcacagatgagttgaagtacgcttcgttcttccacgctatatcttccggattgaatttcatcgaaggtttcttccatttcttctggagaaatgtctgccagaaatcccagacgtccggtattaattcctagaatgggaatccctttctttcctacgcggcgggcggctttcagaaacgttccgtcgcctccgatactgattaccatatcggcggtaaaattatccccgtcgaacagatagtcggcatgaacatccatttttaactctgcggtcaggaattgataaaagtccctgcacatacatacttccgctttttgtcttctcaacagttggaatagcctgagggcatgcgaagacttcttagcttgataagtatttccgaaaatggcaaatttcataagcgacatcattagttatggttgcaaatttggcacttttttctgagatagccaatcagtttgcgaatattcggtttggcgatatagtaaaagtgcccgtaacttcaacggtgctttcacaaaatgtaatgatttgcatagtattacaaatatgcgtcgggtggaaggaaagtacacaaaagtatgcttattctgtgttttcttgtggttttctactttaaataaccaaaaaagaacctataatgcgtttcgtattattaggcaactaataataatatttgtatttttgcgccaaatattacgtagaactatgactaaattaagtgtaaacataaacaagattgctacgctgagaaatgctcgcggagggaatgtgcccgatgtagtaaaggtggcgcttgattgtgagtcttttggcgcagacggcatcactgttcatccccgtcctgacgaacgccacattcgtcgttcggatgtatatgatttgcgtcccctgttgaggactgaattcaatatcgaagggtatccgtcaccggaatttatagatcttgtgctgaaggtaaagccacatcaggtcacattggttcccgatgatccttcacagatcacttctaactccggttgggacacgaaagctaatctggaatttctgactgaagtcctcgatcagttcaacagtgcaggtatccgcacttctgtttttgtagctgctgatcccgaaatggtggaatatgcggcaaaagccggagccgaccgcgttgaactttataccgaaccctatgcgacggatttcccgaagaatccggaagcagccattgccccttttatcgaagcggccaaaactgcccgtaaactgggtatcggcctgaatgccggacacgacctgagtcttgtaaatttaaactatttctataaaaacattccctgggtggatgaagtctctatcggtcacgcattgattagcgatgcactgtatttgggactggaacgtactatccaggaatataaaaactgtctacgctgatgaatgcaatgatcttgttagcccaaggggctatgaatatggctgactcgctggctaccgccaaccccgtactgacggaggtaaacgctcccgaaatgaatatgcttgatatggctatcaagggtggttggattatgattgtgctgggtgtgttgtccgtagtctgcttttacatcttgttcgaacgtaattatatgattcgcaaggcgggaaaagaagaccctatgtttatggaacgtatcaaagactatattcatagtggtgagatcaaagcagccattaactattgccggacgatgaacactccttcggcccgtatgattgagaaaggtatcagccgtctgggacgtccgatcaacgatgtacaggccgctattgaaaatgtgggtaacattgaagttgcgaaactggaaaaagggctgactgtaatggcgaccatttccggcggtgccccgatgctcggattcctcggtacggtgacaggtatggtgcgcgcattctacgaaatggcgaacgccggaagcggaaatattgatattacattactttccggcggtatctacgaagcaatgattactactgtcggcggtctgattgtcggtattattgccatgtttgcttacaactatctggtgatgctggtagaccgcgtggtaaacaagatggaatctcgtaccatggaatttatggacttgctgaacgaaccggctcagaagtgattcatattccccgaacttataactttataataactcataaacgtgggattaaaaagaagaaatagagtatcgcccaatttcagtatggcttccatgacggatgtcattttcctgttgctgatattctttatgataacctctacggtggtatcgcccaatgctataaaggtgttgttgccgcaaggcaagcagcagacctcggccaaaccgctgacgagagtcatcattgataaagacctgaacttctatgccgctttcggtaatgagaaggagaagccgtacgccttgaacgaactgactcctttcttgcagagttgtgcggaaaaggagcctgaaatgtatgtggcgttgtatgcggatgaatcagtaccttatcgtgaaatagtgcgggtgctgaacattgcgaatgagaatcattttaagatggtgctggctacacgcccgccggaaaataaataagaagaacgatggacagaagaaaaaagggtgaatacgtaggagcgttgggtgcattgttggtgcacgtggcagtgattgctcttttgattctggtgagctttactgtccctcaaccggatgaggacgcaggcggaatccctgtaatgatggggaatgtggatgctgcgcgtggctttgacgacccatcgttggtcgatgtcgatgtgttggacgaagaggccccggctcctgctcagactcagccggaactcccttcggaacaggatttgttgacgcagaccgaagaagaaaccgtcactctgaaaccgaagacggaggagcccaagaaggaaacggtaaaaccgaaagaagtagtgaaaccgaaaaagcctgtgaagaagccggagaagaccgaggccgagaaagcggcggaagcgaaacgcctggctgaagcgaaagcggaacgtgaacgtaaagctgccgaagaggccgcgagaaaaaaagtggccggtgctttcggcaaaggttcacaaatgacagggaacaagggaacatcagccggtggcacgggaacggaaggcagtaaggaaggtaattcttccaccggagcaaagaccggaacgggcggttacggaacttttgaccttggcggacgttctttaggtacgggcagtttgcccaagcctgcttacaatgtgcaggaagaaggacgtgtggtggtgaacattaccgtgaatcctgcaggacaggttgttgcaaccagcattaaccctcaaacgaatactgtaaactctgttttgcggaaagccgccgaagatgcggccaggaaagctcgtttcaatacagtggacggagtgaccaaccagacagggacaatcacttattattttaatttgagatagtatcattaaccaaaaatataggattatgggaactgtatacgctttttttgcagacgggtttgaagaaattgaagcctttactgctattgacacgctaagacgtggcggactgaatgtggaaatcgtatccgttacaccggatgaaattgtagtaggtgcacatgatgtatctgttctttgtgacatcaacttcgataattgtgatttctttgatgccgaacttctgttgttgcccggaggaatgccgggagcagctacgcttgataaacatgaaggattgcgtagattgattctcgatttcgccgccaagaacaaaccgattgccgctatttgtgctgctccgatggtactgggcaagctgggtctgctgaaagggaagaaggcgacttgctatcctagcttcgagcaatatctggaaggtgccgaatgtatcgatgctccggttgttcgtgacggaaatatcattacgggtatgggaccgggcgctgccatggaatttgctttgactatcgttgacttgttggtaggtaaagaaaaagtagacgagctggtagaggcgatgtgcgttaaacgctaagttgtccatgaagaaatatgtaatcattgttgccggtggaaagggcttgcgtatggggagcgacctccccaaacagtttcttcctgtcgccggtaaacctgtattgatgcatacactggaagttttccggaagtatgatgcggcaattcaacttattttagtccttccacgggagcagcaggacttttggaagcagctctgtcgggaacacgatttcgatgtggaacatcgggtggcagacggaggagaaactcgtttccattcggtgaagaacggtttggcattggtgcaggctcctgggctggtgggagtgcacgacggtgtccgtccgtttgtctcggtagaagtgatccgtcgttgttatgatttggcagaacagcataaagcggtgattccggttgttgatgtagttgaaacgctgcgccatttaacggaagtcggaagcgagactgtgagccgcaatgattataaattggtgcagacgccgcaagtctttgacgtcgaactgttgaagcaggcttatgagcaggaatttactccgttctttactgatgacgcctcggttgtggaagcaatgggcgtacccgtgcatcttgcagcaggtaaccgtgaaaatataaaaataacgactcctttcgacctgaaagtcgggagtgctcttttgtaaatgtttgatttagtcacacgcgacataaaatttatctccggtgtaggtcctcagaaggcggctgtattaaataaggagttaggaatctactccttgcatgatttgatttactatttcccctacaaatacgtcgaccggagccgcatctattacattcacgagatagatggcaatatgccgtatatccaactgaaaggtgaaatccttggtttcgaaacgatcggtgaaggccggcagcgtcgtctcacagctcatttctcggatggtacgggagtcgtggacttggtgtggtttcagggaataaaatacatcctcggcaaatacaaacttcacgaagaatatatcatcttcggcaagccgaccgtattcaacgggcgcatcaatctagctcatcccgatgtagacaagacggatgacttgaaactttcctccgtgggacttcaaccttattataatacaacggagaaaatgaagcgcagcttcctcaactctcacgcgattgagaagatgatggcaactgtcattctgcagatacaggagcctctgcctgagactctctctcccaaactgttgtcggaacatcacttgatgcctttgacagaggctctgcggaatatccatttcccgactaatcccgatttattacgccgggcgcaatataggcttaaattcgaggagctcttctacgtacagttgaacatcttgcgctatgccaaagacaggcaaagaaggtatcgcggctatatctttgaaaaagtgggcgacgtattcaacacgttttatacaaagaaccttcctttccaactgacaggcgcacagaaacgagtgctgaaagaaattcggaatgacgtgggtagcggtcggcagatgaaccgtcttttgcagggagatgtaggtagtgggaaaactttagtcgccttgatgagtatgttgctggcgttggataacggctaccaagcctgcatgatggcgcctacggaaatattagcgaaccagcattacgaaacgattaaggagttactgttcggtatggatatccgcgtggaactgctgacgggctctatcaaaggaaaaaggagggaagccattctcaccggtttgctgacaggagatgtgaaaatactgatcgggacccatgcggttattgaggataccgttaatttttcttctctcggttttgtggttattgacgaacaacaccgctttggcgtggcgcaacgtgcccgcctttggagtaagaatattcaaccgccgcacgtgctcgtcatgaccgccactcctattccccggacgttggcgatgactttatacggtgacttggatgtgtccgtcatcgacgaactacctccgggacggaaaccgattgctactgttcaccagttcgacaaccgccgggaaagcctgtatcgctctgtacgcaagcagattgaggaaggacggcaggtttatattgtctatcctttaataaaggaaagtgagaaaatagacttgaagaacctcgaagaaggctatcagcatatcctggaagaatttcccgaatgtactgtatgtaaagtgcatggcaaaatgaaggctgccgaaaaggatgaacaaatgcaacttttcatttcaggcaaagcgcaaataatggttgccactacagtgatcgaagtcggcgtgaacgtaccgaatgcttcggtgatgattatagagaatgccgaacgtttcggactttcgcaactgcatcagttgcgcggtcgggtagggcgtggcgccgaccagtcttattgtattctggtgacaaattataaactgaccgaagatactcgtaagcgactggagataatggtgcgcacaaatgacggctttgaaatagcggaagctgatttgaagttgcgcggtcccggtgacttggaagggacgcagcagagtggtgtcgccttcgatttgaaaattgcggatattgcccgtgacggacaattgctgcaatacgtccgtgcgatagccgaagatattgtagaacatgatcccggtgcacagagtccggagaatgaaatactgtggcggcaactcaaatccttgcggaaaacgaatgttaactgggctgccattagttgaaaaacggttaaacatgcagtttatttgcgggaatgtgttgcaaaacatgttttgcttctattctccctattcatagggatttaacgcctgaatgtttgtcttatttccggctaatcatctgaaaaatagttaataactctcttgttgtttcatcggaaaatgctacctttggaggaatttttttagtaaatgtatagtttaaccattagaaaagtcgtatatcatgcttgaaaaaacgctggtcattttaaagccttgtaccctccaacggggattggttggtgagattactcatcgttttgaacgtaaaggactgcggttggccggcatgaagatgatgcaactgactgatgaattattgagcgaacattatgcccacttgagcagcaagcctttctttcaaagagtgaaagattccatgatgacagctcctgtcattgtttgttgtttcgaaggtgtggatgctattcaaactgtccgtatgttggcgggtccgacaaatggacgtctggctgccccgggaactattcgtggggattacagtatgagctttcaggaaaatatagttcatgcttctgattctccggagaccgcagctatcgagttaacgagattttttaaaccggaagaaatattcgattacaaacaggcgacatttgactacctgtatgcaaatgacgaatattaattgaattgacaaagaacgaatgaatttcaattgtattattaaaacaggattggtagctgttgcgactatggttagtttgagctctttctcacaagacctgattgctcgtcaagcaccgatagacaagaaattaaaaacagtagactctttggcattgcaaaagcaaatccgtgccgaacagtcggaatatcccgccctaagtctctatccaaactggaacaaccagtatgtacacgcttacggaaacgctattatccctgatacttacacgatcgacctgacaggtttccacatgccgactcccagcacgaaaatcacttcgcctttcggtccccgttggagaagaatgcacaacggtctggacttgaaagtaaatatcggtgatactattgtagcagctttcgacggtaaagtgcgtattgtgaaatatgagcgcagaggatatggtaagtatgtcgttatccgtcatgataatggattggaaactgtatacggacacttgtccaaacaactagttgaagaaaatcagctggtcaaggccggtgaagtaatcggattaggtggtaataccggacgctcaaccggttctcatcttcattttgaaacccgtttcctcggaatcgcaatcaatcctatttatatgttcgactttccgaaacaagatatcgtagccgatacctatacgttcaggaggactcaaggttcgtcgaaacgtgccggttctcatgacacgcaagtggctgacggtacaatccgctatcataaagttaagagtggtgatactttgtcgcgtattgccaagttgcgtggtgtatcagtcagtacactttgtaagttgaatcgtatcaaaccgactacaactttgcgcatcgggcaagttttgcgctgttcataaacagcattgcttataaaacagtaatacaacaatacctttagaagagggcactttaatataatttagagtgccctctttctgttttcacttaattattgttacctttgcgcactatttggaagaaaatgaaagataccaagcaacaatttgaacatgtcatcgctatttgccgtgacttatattccaagaagctgcacgattacgggcctgcatggcgtattctgcgtccggcttcggtgactgaccagatttttatcaaagccaaccggattcgtagtattgaaacaaaaggtgtaactttggttgacgagggaattcgttccgagtttattgcgattgtcaattacggtattatagggcttattcagttggaactggggtatgccgagtctgccgacatcagcattgaagaagcgttggctttgtatgataaatatgtcaaagaggctctggaactgatgcttgccaagaaccacgactatgacgaggcatggcgcagtatgcgtatcagctcttacacagacttgattttaatgaaaatataccgtaccaagcagatcgaaagtctgtctggcaacacgttggtgtccgaaggaatcgacgccaattacatggatatgattaattactctgtattcggattgattaagatagaatttgaaggttaagaatttacatatcattcaggaggtaatagcgaatatcagtcgctttattttggcggctgcatttatcttttccggatttgtaaaggcagtagatccactgggattccagtacaagatacaggactatctggctgcattcggaatggcttcctggtttccttcattcttcccgttattgggaggtatcgcattatctgccatagagttttcaatcggtatctttttgttctttggtgtccggagaacagtggcttccacgttggcgttgatgttgatgagttttatgacaccgttgacattgtatctggcaatcttcaatccggtgtccgactgcgggtgttttggagatgcttgggtgctgactaattgggagacatttatcaagaacgtactcttgttgcttgctgcaatcggagcgtttaaaggcaggaagatgctggtccgctttatcagtcaaaaaatggaatggcttgtttctctgtacacgctgttttttgtgtttacgttgtcgttctattgtcttgaccgtttgccggtattggacttccgtccctacaaggtaggaaagaatatactggaaggaatgacgatgccggaaggagcgaagccgagtgtatatgaaagtgtctttattttggagaagaacggagaaaataaagaatttacactggagaattatccggatagcacatggacatttgttgatacacgcactgtccttaaagaaaaaggatacgagccggctattcatgatttctctatgatagaactgaatacgggagaggacatcacggaagatgtactgactgatatggggtacacattcctgttggtcgcccaccggattgaagaagcggatgacagtaatatagacttgattaatgaagtctatgattactcggtggagcatggctataagttttattgcctcacttcttcaccggaggagcagatagaactgtggaaggataagaccggggcggaataccctttctgccaaatggatgatattacactgaagacgatgattcgctctaacccgggattgatgctgattaagaatgggactattctgaacaaatggagtgacgaggatatcccggatgaatacgtactgaccgacaaactggagaatctgccgttaggacaacagaaggtcggtaatgatgtgcatacggttggctttgtgttcttgtggttcgttattccattactgctggtgcttggagtagatgtgttggtcgttcgtcgtagggaaaggagaaataccagaaaagctgcggaagctaagaagcaaaagagtgaagtgcaaaacatcgttccgaaggttggtgaagaacaaaaagaagaggagccggttactgatggcagtgatgattgataaattgatactatcttcatcttccggaaggaggagagtggagatactaccgagactgattgtccggctttgatataaagaatggaaatggatttattaaccctttaaataaaaaacaaaatgagaaagaacattgttgcaggaaactggaaaatgaacaaaacccttcaagagggtatcgctttggcaaaagaactgaacgaagcattggctaatgaaaagcctaactgtgatgtaatcatctgtactccgtttatccacctggcttctgttactccgttggtagacgctgccaagattggtgtaggcgctgaaaactgtgcagataaagcatctggtgcttatacaggtgaagtttctgctgagatggtcgcttctacaggtgcaaaatatgtaatcctgggtcactctgaacgccgtgcttactatggcgaaacagtagctatcctcgaagaaaaagtaaaattggctttggctaacggtctgactccgattttctgtatcggcgaagtattggaagaacgcgaagctaacaagcagaacgaagtagtagctgctcaaatggaatctgtattctctttgtctgctgaagacttctctaagattatcctggcttacgaacctgtttgggcaatcggtacaggaaaaactgctactccggaacaagcacaggaaatccatgctttcatccgttcaatcgtagctaataaatatggtaaggaaatcgctgacaacgcttctatcctttatggtggtagctgcaagccttccaacgctaaagaactgttctctaaccctgacgtagacggtggtctgattggtggtgccgctcttaaagtatctgatttcaagggaatcattgatgctttcaacgcgtaattaaaacttatttcgggcacgggcggattatatagtccgtgcctaaatacaattatcaaatgaagaaactagctttacttatcttgctgtttgttttggctggcgccagtgcacaggcacagaacattgtgaaaagcctcgaacgtaacgttccgggacaaggaaaggtgaccattcaccaagatccccgcattgaagcgatgattggtatggaacgtcctgcaaccggtgaacagaaagtcatgaagggttccggcttccggatacaggcgtatgccggtaacaatactcgtcaagcaaagaatgatgcttatcgtgtgtcatcacaggtaaaagtgtatttcccggagctggcagtgtatacgtcgttcaatccgccccgttggctttgtcgtgtgggtgatttccggagtatagaagaagctgacgcgatgatgcgcaaaatgaaagctactggtgtgtttaaagaagtttctattgtaaaagacgaggttaatattcctttataaatctatcatgttaggaaaagaagaaattgtctctccaaatctggaggagttgaaaagtcattatcacagtattattaccttgttgggcgaagacgccgaacgggaaggtttgttgaaaactccggaacgggtggctaaagcaatgttgagtttgacaaaaggttatcacatggaccctcacgaggtgctccgttctgctaaatttcaggaagaatacagtcaaatggtgattgtgaaggacattgatttcttctctctttgcgagcatcacatgctgccgttctacggaaaggcacacgtggcttatattcccaacggctacatcaccgggctgagtaagattgctcgtgtagtcgatatcttttctcatcgcttgcaagtgcaggaacgtatgacgttgcaaatcaaggaatgcatccaggaaacattaaacccgctgggggtaatggtggtagtggaagctaaacacatgtgtatgcaaatgcgtggtgtggaaaaacaaaactcaattactactacttctgacttcacaggggctttcaaccaggcaaagacgcgtgaagaatttatgaatcttatccaacacggaacaacattataggggaagttgccgtgaaatggataaagttatgctccggcatcaatgagaaaaggtatttggttttgataaaggagatgcttcctgtcggaggctaccgcacatatggcgacgaaaataatttatcgcaatacgactctgtctcccaaacgttttgccataatactttgtatccctctcaagtcattataacgtatcattaaggcattacatttttcttcgtcatgtgcaagagccggatcctgcaaggcataaagcatgtgttttaattcttccgtgacaatagcatatttgaaattaatcatcaacatcggaaccagttcgtagagccgttcttcatctgtcacaatcttctgggacttggagtggtatttgctaagttgatagcggacattaatcaggtctacgctcaatttgctgatgacaggatcgggatgtgccagaaaatatcgttccgctacgaatccggcattatgtatatgtgcggcagcctccgacaggatttgccggtgcaacgggttgtggaaagccagatcgtcttcctttaaatcgttgataacatattcaattacggttaccggaatttcattcccttcctcatctgttaggttacacataatcttttctccgtaacggaccacggcttgtaaaatcaaccgttcaaatttatagaactcctgtccctctttaccttcctgtgggatgaaagaagcgtaattgtcttcttgcagggcaggtggaacgttcagatagttaccgtcgccatctacttcgggagctagcatgacatcttcaggaggcataggtatgccgttgtcggaagagggagatgcagttgcaccgccttgtgtcatgttagccgttctttcagcgatacggcggtcacgttctgtttgttcagctcgtttctccgcttgcgtttcccgtcttttggctacttccgataccagtaatttatcttctatgtgcagcagctgcgcacattctttgatatagacgtcgcgtacaatcgcttccggtatgacggagatgctttgcaccagattaccgataagctctgcacgtttgatcgggtcttttcctgcatcttccagtaataagttggttttaaaacggataaagtccgtttcatgttctgcaatgaaggcttgaaactccgtggagttatgtttgcgggcaaaagagtccgggtcgtcaccgtcgggaagaaggcagactttgatgttcattccttcttcaaggagcatatcaatgccgcggatagaagccttgatacctgctgcgtcaccgtcgtaaagtacggtcatgttgttggtgaaacggtgaatcatgcggatttgtcccggtgtaagagcagttcctgaagaagcgaccacattctctatgccggactgatgcattgaaatgacatccgtatatccttccacaagaaaacaacggtcttgtttcacaatcgcctgtttggcaaaataaatgccgtataattcgttacttttatgatagatttccgattcgggagagttgacgtacttaacttttacgccttttgtggcactggcaagcacacgtccaccgaaggcaactactttgccggagagagtgtggacagggaaaatgacacgtccccagaaacggtcccgcaaacggtggtcgtcggtttcgtagcagagtccggtttttaccagatattctttcttatatcctttttgtagcgcttccttggcaagtgcatcgtggctctcggtacaatatcccaactggaatttctcgatgatatcatcccggaaaccgcggttgcgaaagtaagccataccgatactgcgaccgtctacgtggttcttcagtatattctgaaaatagtcgcgggcgaagttattgacaatgaacagactctcgcgctcactttgcaccagcttctcttcatcgctcaactctctttctttaatttcgatattatacttcttggcaaggtatctcagtgcctccggataagacatctgttcgtgcgccatgataaagtgcacggcgttgcccccttgtccgcaggcgaaacatttgcagagtcctttagcgggtgaaacataaaaggaaggagttttgtcactgtggaacgggcacaaaccaacataattgacaccgcgcttgcgcagggtgacaaaatctgaaacgacatccataatctgtgccgcatccaatatccggtctatggtagcttgatctatcattctttcttttctcctgtgaatccgtttttgcggatacaaaggtacacataaaaaaatcccctgcaaagaacttttttgcaggggaccgttaaatcttacctatatcggccggggattatttaatcttttcccggatcttcgtcagatactttttcatgccttccgcatctttattctcaatgatttcgagaaggttcttcagctctgtccggatattggttacttggcccggagtgcgcgggttgaacaggatttcctgaagcaggtagtcgtcttcgctgagcagtcctttggcaatggccatgtgttttttgaaagtagttcccggtgcttcctgatgtttcataaccgctgcgaatacgaaagtcgaaacgaacgggatagacagggagtaggctaccgtttcatcgtgttcatcgaaagtatattcgaagatgttcagtcgcaatgtctgatacaggtctttgaagaatatctttccgaggtggtctccttcactgatgataatggcattttcgctgcttaggttgctaaggctggcgaaagtcgggccaaacatcgggtgactggatacatatcggaagccgctttcttcgtagaacttcttcagtcctgtttttacagaggcaatatcactaatgatgcagtctttgggcagtacgggcagcactttgcgaaaagcgtccaacgtatactttactgtcacggcatttatgaccagttcgggctcaaattccttaatctcctccaatgtggtgaaacgatacgtgttatagacgaaacgcagttggtgcgggttgacgtcgaacacggccgtctcatgttgaaagctcaatatgtcagtaaagaaggagcccattttgccggctccgaggattaatattctcatattcttatttattaaagtttcgcatatactgccttccgtatggctttctctctcagagggaagggtaccggtagggatgaggtatatttttcttttaaaaaggtatattcattatttttcctaccacctccccctacgggtactcctccttcccgaaggaggagaagctatgcagaaagcttacgaagcttcagtttattacctgattatttattaataatttccatttgttgacgaacggattcttcatggattgcttcaaatatttttttcataaactctgcatccatgccgcattgttcaccttgtgcaccgcgcttttcaagaatctcattataacgtccggcctggagaacggtgattccgtgttctttcttgtaagtaccgatttcgcgggcgatgcgcattctttttgctaattcctgaatgatgttatcatcgcattcatcgatttgcttacgaagttgggacaagctttcggtagtctgggtttcggtgcggataaccagtaaattgaggatgtagtcgagtacgtccggggtcacttgttgtgaagcgtcgctccatgcgcaatccgggttacagtgactttccacaatcagaccgtcgaagttcaggtccatagcctgctggcaaagcggggctatcaattcacgctttcctccgatatggctcgggtcgcagaagataggcagattaggaatgcggcggcgcaattcgataggaatgtgccattgggggaggttgcggtatatctttttatcgtagctgctgaaaccgcggtggatagcacccagacgtttcagacctgcattgctgatacgttccaaagctccgatccacagctcaagatccggattcacgggattcttgaccaataccgggatatcaacacctttcaatgcatcggcgatttcctgtacggcgaaagggttggcagtggtacgtgcgcctacccaaagaatatcgattccggctttcaggcattcgtaaacgtgcttggcagtagctacttcagtagaaacatacattcctgtttccttcttcacttctttcaaccaggcaagaccctctacaccgattccttcgaaacctcccggtttggtacgtggtttccagattccggcacggaatattttctgtcctttggctgccagttgtctggcggtatccattacttgttcttcagtctctgcgctacatgggccggcgatgacgattggtcttttggcttctatgcccggtaataaaattgattcgagttccatattcttatttattttttattcttttaattctttccagtgcttctgctaacttattgtctttgcagcagagcgagatacggatatatcttgctccgttgctgccgaagataaatcccggtgtgatgaacactctcgcttcatgcaatactttctccgtcagttcttccacatccttgcaggaatcgggtatcttgccccagagaaacataccgacttgtttctcatcgtaggtgcaaccgagtgctttcattatttcaccggcaaggtgacggcggttccggtagttccggttgtttccgtcgtaccagtcggcttcagcttccagggcggttgcagccgccagttgcatggcgcggaacattccactgtcgatgttgcttttcactttcaatatccattgtacgaattcgggatttgacgctaacattccaatacgccagcccggcatattgtggcttttgctcatggaattgaattcaatacaacattctttagctcccggcacgctcagaatactaattggcttttcgtttaggataaagctgtacggattgtcgttgacaatcacgagattcttccggcgggcaaagtcaacgagacgttcatacagttccggagtggcgtttgcgcctgtcggcatattcgggtaattggtccacatcaactttacgcggcccaaatccatattctccagagtttcgaaatcgggcatccagccatcttcctctttcaggtcgtagttgataacttccgcgccgagtatcttgctcaaagaagtataagtgggatatcccgggttcggtaccaatacctgttctcccggattgacgaaagccagtgtgacatggaggattccttccttcgagccgattaaaggttgtatttccgtgttcgggttcaggtcgactccataccagcgttgataccatgctgcgaaacctttgcgaagttcggggatacctacatacggttggtaaccgtgtccgttcgggtcgtgggcattattgcacaatgtttcgattgtcttttccgaaggtggcatatcagggcttccgatacccagacttatcacgtcttttccttccgcattcatttgtgctacttctttcagtttcttagagaagtagtattcgcttacacttgccagtctgtcggcgggagcgatcttatacgtttgatttaccttctgcatattcgcctaatattttaagttctttggttaatggagtgattgctgcgatcgattgtttgtatctcagatagtcgttgaaagctacgtccacataaaactggtattcccattcccgtccgataatcggcaacgactgtatcttagtgaggttgatgttgtaaaacgacaggatagacaacacttgtgacaagctgccttccgagtgcggcagtgtgaataccatgttcgccttattgatcgtgtttgtacggtgctggcggagttcgtccacttgccacgggtcggcaacgactagaaaacgggtaaagttatgcttatttgtttcgataccttcttgaaggactttcattccataacgttcggcggctatcttggagcagatagcggcgtgtcctttcagatttccgttcttgatagcctctgcgctgcgtgccgtatcttcaccttccactacttttagttgtgggtgctggttcaggaaatcacggcactgcatcagggcgatagggtgggagttgacttccgtcaggtcttcccaactttcatcgggcaggcagacgaagctgtgcgagatgcgcagtttgtattcaccgataatttgtgtaccgctttgtctcaacaactcgttgttgtgcagcaagctgcctgcaatcgtattctctatggctagcattccgataacctgactgtctttacgtatcgaggtaaacacgtcttcgaaactggcacaacagattaactctatttcttctccctcgaagtacttgtgtgcggcgatatcgtgatatgagccgagtgttccttgaattgctatttttttcattgttataaatgtattatataaaaaaatcccgcgtccatattggagcgggattcatatgattgatttctcttattcagtccttaagcatcatgtcacttgatacatacaaactcccgctctactttctggctaaagtaaaagtaaaaaaagaagtaatatgcataagtaaatgatctcatacgagtctttgttttttgctttggtttctaattctggggcaaaagtaatacttttctgctaaacgcaaacaaaaagcgatactttttttgttttctctgcaaaaaagaatgaaaaagacatgggataccctctgtcggaacgggttgaatgacttccgccaatcagaagattcccggcaatgcttcctgttttgggccgaggttcttgaattctccgttcaggctggcctcatctttcggattcagttccaatgacctcttcatatcttctacagaaccgtctttatctccattcagcagtttggcgcggccgcgttctttgtatgcttctgcaaagttggggttcagttcgattgcttcgtcgaacagactgatagcttctgtcaacttcttctggttgatgaaaagttgtcccaggtagagatatgcctgttcgttgaaaggattcacttctgttacaagttggtagtcggcttctgcttcttcttcctgtccgttggcttctttcactttgccgcgcaggaggatagcggtttcttcttccgggttctgtgccagtacggcgtcaatgtcttccattgtttctttatattgcttcattttcagcaatgcttccgcacgcatcaggcgggcttcgatgaaatcatctttcaaggcaatcgcttttgtcaggtgggcaatcgtcattaggtcgtcgtcctgtcctttacgggctttgcctaacagatagtgtgccactgcatttcccttctcgatagcgatcgctttgctggcagcttcttccattgctttgtagtcctcctgtatgaagcacacattggccaatgtcaggaatgtgtttgtcacatgaggttccatgattgccattttttccagcagttcgcgggccttttcggtttcgcccgtctggatataaagctggctgagataacccattgtctcgaaatcttcttcgatagcaagggcctctgtgaaacattttactgcgtaatccggacgtcccatacgttgtgcacgcagaccgtcatatttgaagatctcgaatcttttccggtcgtttttctgtttttcactttccggtgtttctgactttccggagaagaaagatttaaaaaagttcggcatgatgatatgttgtttttgagtttatctgcaaatgtaataacttattttgatatatgtaacattccgtcctgcatcttcagctcaccttcttccaataaatattggattacccggctgatatcttctctttctgcttcaatggcattcgctattccggcagggggcaaacttttccgggtaagcagttccaggatttgttttctcatttctctgaaagagtcttcgggcaggcagtccgtttcgtgacgattcagacagacgtcgcattgcttgcagttatgctcatttttttctccgaaataacgaagcaacatccggctccggcaaacgctttcggaagtgacatattcttccatggctttgatacgtgcttcgtaccgggctttgcgctcttcgtagacagaagccggaatgtgcaggtaacgcagttccagccgctcgcgcgtgtatattatataaggtgtctttttgtgcgggatataatctacgatacggcgtttggtcagtgtcaccaatatattataaatttgctggcgtgtcaatccggtgcggatagccagtgtgtcttcgctgatataagcataatcggtaaatactcccgtgtaggaacggagaatggtctgtatcagagtttccgcttccgtacccatttcccgtagtttatacagctcgtcccgccggattgtaaaaagaatgcgggaagcattgtcctgttcgtccgtatactccagatagccggcttgcgtcagtattttcaacgcactgtccaccggcacggggaagtatttgaacttcctgcaaaattcttccaggttgaactcacggatacattggaatccgtcacccatggccatttgatagtaatattgcagatgttcgtatacctggaggatatattctttttcggggaaagtgtccgccacccgtttgtgcaatgtcattttgtcggatttggcatacaggataacggcataggctttcagcccgtcccttcctgcccgtccggcttcttgaaagtacgcttcgggagagtcgggaaggtcgatatgcagtacgatacggacatcaggcttgtcgatgcccatgccgaaagcgttggtggctaccatgacgcggatttctccgttctgccagcgtttctgccggaggtcttttacggcattgtccagtccggcatgatagaagtcggcggtaatgccttcctgcattaataattcggtgatttctttggtgcgtctcctgttgcggacatagataattgcgctgccgtctatccttttcaggatatgtagcagttctcccgtcttattgtccgttttgcggacgatatatgccagattcttccgttcgaaactcatacggaaaacattctcttcgcgaaagttcagccgtgactgaatatcttttacgacttccggagtagccgttgccgttagtgccagcaccggaacacccggcagcagttcccgtatttctgctatcttcaggtaagccggacggaaatcatacccccattgtgagatacagtggctttcgtctaccgtaatcatggagaccttcattgaacgaagtttgatacggaatatttccgtatccagccgttccggagagatataaaggaacttatagtcgccgaagatacagttttccagcgcagtgacaatctcctgacgtgtcatgccggaatatatggcgagcgctttgattccgcgtttgcgcagattctgcacctggtctttcatcagggcgatgaggggggtaatgacaatacaaagtccactctgggcgagagcgggcacctggaatgtgatagatttgccacctccggtcggcattagccccagcgtgtccttaccttcgcctatactggtgatgatctcctcctgcaagtcgcggaaggagtcatatccccaatattgttttaatatctcctgatacttattcaatcggctttatatcttcgatttgaagttggacttcgccacgcttgtgcgtgttttcttcaatggtgtaacaaatgtcgaaggagcgctttgtcttgatatagcgcacgtgcgaactttgtccgaatgcgataccgttcattacattgttcgacttgttgtcaaccagttccaatttgatatgttcctggtcgcgtcccaccactttgcttgtaccgtagtcatatacatgatgcgtacagaaaatcggcttcatattgtccgggccgaaaggattgaacttcttcaggtcactgaagaacctgggcgtaatatccctgaaatcaatttctgcatcgatgtcgattaccgcactggtctgttcgggcaggatatgctgcgaaacgaagtcctcgaaccgcttggtgaaagcctccacattctctactttcatggataatccggcagcatatgtatgccctccgaagttctcaagcaagtcgcggcaatgttcgatcgccttataaacatcaaaaccggaaacggagcgtgccgaaccggttgccatgtcatctgtccgtgtcagtacgacggcgggacgataataaacttctgtcaggcgggaagctacgataccgatcacccctttgtgccattcttcattgtagagaacgatagaacgccgttcggccaacccttccagattggcgacaatgttgttggcttcttccgtcatgctcttgtcgaggtccttgcgggtttcgttgtactggttgatttgtcctgctttctccagtgcaaccgagaaatctttctccgtgagcaggtcgacagcttcttttccattctggatacgtcccgaagcattgatgcgcggtccgattttgaacacgatatcgctgacagtgatttcccgttcggagagtccgcagacgtcaataattgctttcattcccacactcgggttactgttcagctgtttcagtccgtggaaagcaagaatacggttctcgcccataatcggcacgatgtccgaagcgatacttaccgctaccagatcgagcagaggaatcaagtgatgaaactcgataccgttgctgatagcaaatgcctgcatgaacttgaaaccgacaccgcaacccgaaaggtgtgtgtacggatacgtattgtccggacgtttggcgtttaggatggctacggcaggaggaaggatgtcgtccggcacgtggtggtcgcagatgataaaatcaatacctttctctttggcatacgttatttcctccactgctttgatgccgcaatcgagtacaataatcaatcctacaccggtttcagcggcatagtccactccttttttagaaatgccatacccttcgttatagcggtcgggtatgtaataatccaagttcgaatagaactgttggataaacttgtagaccagtgctacggcggtagttccgtctacatcataatctccataaatcagaatacgctctttctttcccatagccttattcagacgttctactgcaatatccatatcgttcatcaggaacggatcgtgcaggtcgggcaattgcgggcggaaaaacttcttggcgtcaaccgccttcgttattccccgctgtaccaaaagttgtccaagtatcgggctaatccctaattcctgggccaatgtctggcttgtctctgcctgttcgggtgtaatgggttgataattccatttgtgattcattttatatattgttttttctttttctgctctcaggggtcagaaaggcacttcttcccaacaaggggtaaaagtacgaaaaaaaccggaggtgagtgtagatatgacgaaaatatttcaaaggggatagaaaatcggaagtttgctaatggtggcattaagtgtttacggtggctttttaatagatgacttctttggcattaagatcaaagttctccggcattaagactaaacttctcttggataaggattgaacttttttcggataggaatcaatctataaacacaagttccgtttttataaacgaagccttcatttataaaaacgaagctttcatttttataatcaaagcttgcatttatagattgatgttaggcaacgataactttgtcactggatgggcggaagtttgtaataaacagacagcaactttgctatactcttatgataaataaagattctgatcctgttggagtgcggctatatatatgacttatatcaaaccagctctttccaatatgataaggttggaaagagctggtttgatattgagaggtatatgtttttatttcttctttcttaaatccctgccttcatacttgcagatcgcttctatccattcctccgtcagaggcatggactcatgtctctccaggtcgaaagttaccatgattgatttgcagatacattttatctcgttcgtctttgtgtcgatcacccgttggagcagatgaaagcttttcgttcctacttcggaaacggcagtctgtacggcgatatggtctgatgcgaagatctgtttgacgaaatctgcttcgatatggacaacgacaatgccggtcttctcccagtcgactccgggacatacggaagcgaagtattcagtcttgcccaaatcgtaaaaagaaaaataaacagtgttgttgacgtgaccgaatttatctacgtcattgaagcgcaactgaataggtagcgtgtggtgaaatacgatttcttccattgttttcacttaatctttttgaattcgacgcaaaagtagtacttttgcgtgttattctcaactgaaattactcaagaaatgatagaagatattaaaaaagcctgtcaggtgatgaatgaaggaggtgtcatcctttatcctaccgataccgtttggggcataggctgcgacgcgactaacgaagaagctgtacgtcgggtatatgagattaagaaacgtgccgatagcaaagctatgctggtgctggttgattcgtctgtcaaggtggatttttatgtacaggatgttcctgatgtggcatgggatttgatagaagttgccgataaaccattgacgattatctattccggtgcacgcaatttggctccgaacctgcttgcggaagacggaagcgtgggaatccgtgtgacgaatgaagcgttttccaaacgtctttgccagcagttccgcaaggcaatcgtgtctacatcagccaatgtaagcggccagccgggagctgccaattttagtgaaatcagtgacgagatcaaatcggcagtagactatatcgtcggctatcgtcaggacgatatgagcagaccgaacccctcaagtattataaaactggacaaaggtggagtgattaagataattcgcgaataaatgaaagaggaaaaacttagtttattgcagcgttgcatcaagtggcgggaaaataatatcaaggagaaacagtttatcctgatattgagttttctggtggggattttcactgcgtttgccgctttactattgaagttcttcattcaccagatacagaacttcttaacagataatttcaatgcgacggaagccaactatttgtatctggtgtatccggtagtcggaatttttcttgcaggctggtttgtgcgtaacattgtgaaggatgacatcagccatggggtcaccaagattctgtatgctatctcccgtaggcagggacgcatcaagcggcataacatttggtcgtctaccattgccagtgccattacgatcggattcggcggatcggtaggggcggaggcgccgattgtgctgacggggtcggcgatcggttccaatttgggtagtgtgttcaaaatggagcaccggacgttgatgttgctggtaggatgtggcgcggcaggtgcgattgccggaatctttaaggctccgatcgccggactggtgtttacgctggaagtcctgatgatagatctgactatgtcttctttactcccgttgctgatttctgcagtgacggcggcaaccgtttcgtatatcactaccggcacggaagccatgttcaagtttcatctcgaccaggcattcgaactggaacgtattcctttcgttatcctgctggggattttctgcggtctgatttcgctgtacttcacacgtgctatgaactcggtagaaggagttttcggtaagctcaacaatccttataagaaactggctttcggcggtgttatgctgagtgtgctgattttcctttttccacctctctatggtgaaggttacgatacaatcaacctgttgctgaacggaacgtctgcggcggagtgggatacggtgatgaacaactccatgttctacggctacggcaatctgttattggtctatttgatgttgattatcttattgaaggtatttgcttccagtgcgacgaacggtggtggtggatgtggtggtatatttgctccttcactttatctgggatgtattgccggatttgtattctcgcatttcagcaatgatcttgctttttcagcttatctgcccgaaaagaatttcgctttaatgggaatggcgggagtgatgagcggagtgatgcacgctccgttgacgggtgtcttcctgattgctgaactgaccggaggatacgacttgttccttccgttgatgattgtgtctgtcagttcttatcttacgattatagcatttgagcctcacagtatctattcgatgcgtctggcaaagaaaggacaactgcttacgcatcataaggataaagcggtattgacattgatgaaaatggagaatgtcgtggagaaggatttcgtagtggttcatcctgaaatggatttaggcgaactggtgaaggctatcgccgcttcccaccggaatgtgtttcccgtgacggataagaagactggcgaactgttgggagttgtactgctcgacgatatccggaacatcatgttccgtcaggaactttatcatcgttttactgttaataaattaatgacatccgccccagccaagatattcgattcggacggaatggaacaggtgatgcagactttcgatgataccaaagcctggaatcttcccgtggtggatgaggaaggacgttatcagggatttgtctctaaatcgaagatatttaactcataccggcaggtattagtacatttttcagaagactaaccacccgccgtccgacaaggtaccggggcctgggttctatgtagataaaagtgattagattatgaagaaagaagatttaagaatagtatatatgggtactcccgattttgcggtggaggccttgcgtcagttggtagaaggcggatataacgttgtgggcgtgataacgatgcccgataagccggccggacgcggacataagattcaatattctcccgttaaacaatatgcgctcgaacagaatttgccgttactccaaccggagaagttgaaagatgaggcgtttgtacaggcgttgcgtgaatggaaagcggatttgcagattgtggttgctttccgtatgttaccggaagtggtgtggagtatgccgcggttgggaactttcaatctccatgcttctttgcttcctcaataccggggggccgctcctatcaattgggcggtaattaatggagatacggaaacgggtatcactactttcttcctgaagcatgagatagatacgggagaagtcattcagcaggtacgtgtacctattgccgatacggataatgtagagattgtgcatgataaactgatgatgttgggcggaaagctggtcgttgagacggtggacgccattctgaacggtgtggtaaaaccggttccgcaggaagaaatggcgattgtcggtgagcttcgtcctgctccgaagatattcaaagagacttgccggatcgactggaagcaaccggtgaagaaagtctatgattttattcgcggactctctccttatccggctgcctggagtgaattggtcagtcctgaaggagaagtggtggtcgtgaagatttttgaaagcgaaaaagttagtgaagcgcatcaattgtctgccggaacgattgtgacggatgggaagaaatatataaaggtggctgtgcccgatgggttcgtgtctgtcctttctttgcaacttcccggcaagaaacgtctgaaaacggatgaattgcttcgcggattccgtctgacgaacgaatataaaatgaactgacctgataatagataacatgaaccgtctcgagttcgagacaaaccgaatctaaaataaaagaattatgaaaccaattatcgctccttccattctttccgctgatttcggatatttggcgaaagatattgaaatggtaaaccgcagtgaggcggaatgggtacatattgatattatggacggggtatttgtccctaacatctcattcggctttccggtactgaaatatgtggcaaagctgagtaagaaaccgttggatgtgcatctgatgattgttaatccggagaagtttatcccggaagtaaaagcattgggagcgcatacgatgaatgtgcattatgaggcttgccctcatttgcatcgggtggtacaacagattagagaggcagggatgcaacctgccgtgacgattaatccggcaactcccgtagctttgttgcaggacattatccgagatgtatatatggtgcttgtcatgagcgtgaatcccggatttggtgggcagaagttcattgaacattccgtagaaaaagtccgtgaactacgtgctttgattgaacagactggctcaaaggctttgattgaagtggacggtggtgtgaatctggaaacgggtgcacgtctcgttgaggcgggtgcagatgctttggtagctggtaatgcagtctttggagcaccggatccggaagcaatgattcaccggttacacgagttgtagagaattgtggtatcatatctccatagatatccttatatacgcctggttatcccttggatagcaggcgttttttgtggtgatcgtttcttcaacggttcgctggagctcttttggggaatccttgccttttgttttttagccggtctctctataggttgttatttccttggacgctattctctgcgttggtgcttcggaattgcgattcttgctctttgttttacaggtggctgggtgggaataacctggcagctacaacatgcaacgggatatactttcccgaaagaggaaacggtttatcgggggtgggtgacggatactcccgaaactaaggaacatacttttctttgccgggtattgttgaaagaacagcgtgattcgacagctattcattcgatagatgattgtaaggctattctatgtctgcaacgggattcggcggctgccggattaaagcggggagatgaattatgggtgtctgctcgtatttctccgcctgtaaatggacggaatttcgatgagttcgactatgcccgttatctgatgcggaagggaatcagtggaacaggatatgtcgtgtccggaaaatggatgctggcatcttcagaaatgttatcttccggtaacggaaatattgctcggaagagcactcttctggaggtagccggttcttgtcgcgacagaatactttctctttatcgccaacttggttttgaaggtgacggactggctgtactttctgctttgactgtaggtgataaaaccgaactaagtgactctgttcgtgaaagttattcggtagctggtgccagtcatgtgcttgcattgtccgggttgcatatcgggctgttgtatgccttgctcttttttatattgagtcctgttgcgaagagagggaacgcaggcagatgtttgcgggctgtatttcttcttatccttctttgggctttcgctttttttaccggactttcaccatcggtagtccgttcggcttgtatgttttcgatctgggcagtggcggatatttttaatcgtcaggctttatctttgaatacgttggcggcgactgcatgggttatgttactttgtaatccggtatggctgtttgatgtcggttttcaactatccttcttggctgttgcttctattctactgacatataaacccatttatcggttacttccggtaaagagtaggatcgggagatatttctggggactaatgagcgtatctattgcggcacagctaggcactgctcctcttgttatgttttatttctcccgtttttcaactcattttctgtttactaatttagtagtcattcctctggttaccatcattttgtattctgccgttgttatgcttctcctgactccgctacactggatacaaaattttatagcagagggcgtcaagtttcttctggatgcacttaatactttcattcattgggtagaacagcttccttatgcttctattgacggaatatggctatatcagttggaagtgctcggcctttacctctccggcggtctggtgttttactatttcgcaaaccggggattaaagaatcttctgatctgtctcttttcaatattattgttaggtgtctatcatgtgtctatgtcctgggtggaccgtcctctggatagtattgttttctataatgttcgcggttgtccggcagttcattgtatagacaataatgggaattcacggatagtttatggagatagtctttctgataaaaggcagttgtatcgtgttgcaacaaattattggaatcatcaccaattattgtcgccgttagaggtgacagccgattatcaagataccgcgctctgctgccgggaacaaatactgtcttaccatggacgacgcatttgtatggtgaccgatcatcgctggcggaacaaatctgccgctactccgttatatattgattatctttacttatgcaaaggctataatggtcatttgaaagaactcaggttgctctttgctccggagtgcattatattagatgcatccctttcggaacatcgcaagcaactctttgaagaggaatgtaaacagtctggtttgcgttttatctctttatccgaaaaaggttctgtgcggtttttgctctaagtacaaagatttatcgtacatttgcatcttgataaagtattatagtatgttgacgaaagtaattgaacaagccaaaatagatcattttaccaaatggtttgaacgggctgacaaaatagtaattgtatctcatgtatctcctgatggtgatgctatcggttcttcactaggattataccatttttttgattcacaggaaaagacagtaaacgtaatcgttcccaatgctttccccgatttccttcggtggatgccgggcagtaaagacattctcttgtacgaccgttacaaagaatttgcggataagttgatagccgaagcagacgtaatctgctgtctggatttcaatgcattgaaacgtattgatgatatggcggatgcgatagcagcttctcccgcacgtaaaataatgatcgatcatcatctttacccggaagaattctgtaagattacgatgtcttacccgaagatttcttctacttccgaattgatctttcggttgatctgccgtatgggctattttagcgacatctctaaagaaggagccgaatgtatctacacaggtatgatgacggatacaggcggattcacctacaactccaacaatcgggaaatctattttatcatcagcgaacttctttccaaagggattgataaggatgatatctatcgtaaagtatataatacgtactcggaaagccgtttgcgtctaatggggtatgtgttgtctaatatgactgtttattcggactacaatgcagccttaatcacattgacaaaagccgaacagagtaagtttaattatataaaaggtgatagcgaagggtttgtgaatatccctcttactattaaaaacgtttgtttctcctgcttcctgcgtgaggatacggagaagccgatgattaaaatttcccttcgttcggtagggagcttcccatgcaatcagttggctgccgaatttttccacggaggcggacatctcaatgcctcgggcggtgagtttttcggaacaatggaggaggccaaagctgtctttgagaaagcactggagaaatataaacctttactcacagcaaaaagctgagtgcggaaggttaaaagtgaatattgaaaggttaaaagatacgaactttcaacattcctctttcaacttttaatgattttgagatacatttgtgcggaatatagctaattaacagataatgaagaaacttatatttttatttctctctgtgatagcagccggaagtctgttccaggcatgcgacaattctaagacttatgcagaaatgctggaggatgaaaagaatgcggtgaataagttcatcaaagatagtgcaattaatgtgatctccttagaggagttcgaacgggatacaattaccgatctgtcaagaaatgaatatgttgctttctcaaatggcgtctatatgcagattgtagatcgtggaaatgaggatgatccggaagatacttttgctaataataatgtgatttgtgcccgctatctggaaaagaatatagcgagtaatgagttgacttgtttcaatgttgtccttcctgaatatattaatgcttctgattattatagatctccccttacattccgttatgtcaacgaaaattcatcagcttatggaattgttttaagcactcctcttgattatgattatttgtggacagcaaattcgtacggaacagctattcccggtggatggctgttggcattgccatacttgcgggataatgctcatgtacgtttgattattccttcaaaaatggggcatagtatttcgcaacagaatgtgattccatattattatgatatctggaagtttgaaaaagcaaaaagttaaagcactaacattaaataaatctattagttaaaacctatgactctaatcaaatctatctctggaatccgcggaacaatcggcggaggagcgggcgaaggattgaatccgctcgacatcgtaaaattcacttcggcttatgctactttaatacgtaagacttgcaaagtaaaaagcaataagattgttgtgggacgtgatgcccgcatctccggtgaaatggtaaagaacgtagtagtcggtaccctaatgggaatgggctgggatgttgtagacatcgatctggcttctactccgactaccgaattggctgtaacaatggaaggcgcgtgtggaggtattatcctgacagcctctcacaatccgaaacagtggaacgcactgaaattactgaatgaacatggtgaatttctgaatgcagccgaaggtaacgaagttcttcgtattgctgaagctgaggaatttgactatgcagatgtagatcatctgggttcttatcgtaaagatctgacctataatcagaagcatattgatagcgtgctggctcttgacttagtggatgtagaagccattaagaaagccggtttccgtgtagctatcgactgtgtgaattcggtaggcggtattattcttcctgaattgcttgagcgtctgggcgtgaaacatgtagaaaaactctactgcgagcctaccggaaacttccagcacaacccggaaccacttgaaaagaacttgggtgacatcatgaacctgatgaaaggtggaaaagctgatgtagcttttgtagtagacccggacgttgaccgtttggctatgatttgcgaggacggtgtaatgtatggtgaagaatatacattggttactgttgccgattatgtactgaaacatactccgggtaacactgtttctaacttgagttctacccgtgctttgcgtgatgtgactcgtaagtatggtatggaatataatgcttctgccgtaggcgaagtaaacgtagtaacaaagatgaaggcaaccaatgctgttatcggtggtgaaggaaacggtggagtaatctatccggccagccactacggtcgtgatgcattggttggtatcgcattgttccttagccatttggctcatgaaggaaagaaagtcagcgaactccgtgctacttatcctccttacttcattgccaagaaccgtgtcgacctgactccggaaattgatgtagacgctatccttgctaaggtaaaggaaatctataagaatgaggaaatcaacgatatcgacggtgtgaagattgactttgcagacaaatgggtacatttgcgtaaaagtaatacggaaccgattattcgcgtatatagcgaagcttctacaatggaagctgcagaagaaatcggtcagaagattatggacgtaattaatgagttagcgaagaaataacgcttcattgatattggataaataaaaaaggaggaacttaatcagttcttcctttttttattcgaagtaaattattgtaagagcggggatctccgccctccttatagttccttagaatcggcagcgaagatctatcccaaattgcatcggacgtccttgttgcatgaaccctttgttcattgtttcaaagtagaaggctgcataatctttattcaagaagttacgtgcccaaaaactaatcattgcatcacctatttctaagtttgtgcgccagttgagagtaccgtagaaggattggctgacgttattttgctcagtccaatagattcgtccggcagcgttatagtttgcttggaacactacgcggtcaaagatagaacggggattgcaagtaatagcgtattctccgccgatatttaatgtatgcttggggacgaagggtacatacttgccgttatatgacttatccgtaagattaccctcactgtctttttgctttgttacataatctgtaaaggtggcatacgtatatccgtagcttgcatttagactcaactcatttgtcaggctggtacgtagggcagcttcgacaccataacttctgctttttcctgcattgattgtgacacgtcccaaaccactttctgccatttgagaaatttgttggtcgcgtgtatccatgtagaaggcggcaaggtcagcccaaagtttaccttcccacaaagtcaggtgagaacctatttcatagttccaggaatattcgggcttgtattgagtcgttgctttcacctccggcagttcatctttcattcctaatattctctccgccattaaagaaaagttcgggtcggcagctaatgcatccaacattgaattttttaaagctccttgtgctaaatcagaaaacatctgaatattgtagcctcccgaacgatatcccttggatacagttgcataaatactgtttcctttttcccattcatactggagagcgaatttaggaagtaattgtacgtagtcggtggattccttgccaatgaatgagcttatagcttccaaacctttactggtaatattcataggtcccattgctaaagagaagtcaaagtttagagggttgctgatagaattatactccatcttaattttctcgtagtctaaacgtagaccgattgtggcagatagtcctttgataaacagattattgaatgttgactgatgaaaaacagctccatttaatatcggagtgtcaaaactaccgccaactcccaatatggaattattggctgtcatgcgcatcttgggaccagcaagcccttcaaatattttgtttacattactttcaattacagtttttacgccttcttgcctgaaatctaccgggccgcttgtatgtaaccactgatagaatccggaaactccggttgcccattgccaacgcttctccggctttgatttgaatacgatctcttcagaaattgtatttgctctttgtttctgttccagagtataaatgtctttttctgtaaagtcctgatcgagaaacatacggtcattcaggttttggtagcctgtgaccgcatttaaaataaatgtcctggtttgatattctatattaactccggagtttaataatccgcgacgatagctactgcgttcgttgttggcgatttttccgatatattcggggcgagtttcttctccttctgtaacacctgtatatttataaggatatcccccctggtcactatattcgtagctcaatgtcatatcgactttcagattcggtgtcggcagataaataccgcggaagcgtccgcctccggcgttgcttttatctattttctcattgttgcgtgctgcattctcaaagaaacctcctgtatgttcatagaaacctccggtggagaaagcaaaacggtcggagatacgatgataatgtgtcagtgaaacattatagtcgttgtaggtggcggctcccattcggatatcagtcccttgataagtgaaaggagatttggtatgtatcttgattagtccgcccattgtattacggccgtaaagagtaccttgcggaccacgaagaatgtcgatacgttcgatatcagcgtagttgaagtcgaaagcggacttatctatataagggatattgtctacataaagccctacggagggggtgttgatacgtgaaccgattccgcggatataaatagaagtagtaagtttggaaccatagtccgggatgaacaggttaggaacgatgcctgtcaggtttttcacggagtgtacctgatttgcttgcatatctttttgagataataatgtggtagctaccggcaactcacgtagtttacggttctctttcggagtagcgattactaccacttcttcgatatctaccactttcagtgagtctttcgggaaatcttccgcccatgctgtccctgtcgttaggagcgtgagggcaatcataatattctttgtcttcatctgtagttaatttgtccggtgcaaagtaacggcaaatatcgttgacaggcaatcctcatttattaggattatgcagtatagaaaaacaaaatatgctatgaatatccggaagattttgtcggaaatattctttatttgcctgataatattatatctttgcccgacaacagaactaaatagaaacggattatgacaaagaataaactattcgcttgggctataacacttctctgcttttcattgacctcttgcagcgatgaaaaggacggcccgtcagaaaagatattggtgactaatgcaggggtgacggaagctaaccaaacggttaaaccgggagatatcgttcatatttatggtgatggttttcaggaaggcgaccaggtggactttgactttcgttgggatcttggagaacccttgttcccggaaggatatcttggacctgtcagtgcggagattgtagagaggcattcgaatggaatgagtatccgaatgccttatcgcaagccggaatcacgtgttgagatattcctgaacagggcaagtgagagaatgtcgttgggaaaagtactacttgcagatggacaaacgcctaaagatttcagactgtatggaataaatgagaccgacaagacaatagagcgggcgtatgctgaagaaaccgtcactggtaaaaaaacgtgggatatgagtgcacatccggacttccgttcggttgtcaatcttcaaaagacttatgggttgtgcgggctggcaaaagaaaatggtgtgcagcaacccttcttccttgatttctgtacaggcgagtggaaggctttaagtttctacgattataatacactggcattggttattggcagcggaaatgatattgcggccattcaacagagaggtaaaggatattcattatataatgtttccgcaggtttggaacaaagtaattatgcaactaagacgcggagtaattttcctatgccggaacctcaatttgaacttccggaaggatttactcctgaacaattcggggattatccgggtgtgtttatgcaaggtaatgagattattttattgtcagcaaggaaaggaaacgggaaatgggttcccatgttgtataattatagaaatggcttttatgtacttgaagggattgaagcagatgctattattccgttttatttcggaatggcacttcccgatagcggtagtccttccttattataccaaaagaaggtcggttacatgatttattactcatcaggtgacaatcgtggcagcagtttccgtcttcttgaaccggataaggagagcagcaagttacagttacaagaaccgtttgttcaattgtccgataagaaagttgtttcaataactaacagacctgaccgtatcggtacaatcaccgtgctcttttccgataaagaagaagggcgcaccacttctgattttgattggaacagcaaagagtggacagattacaccgatctttctgatatgccatataactcagtagtatgggctaattgatagtcaatagtaaaaacacttatatccggtctgcttctatatatccgttcattacggcataaatagtcagaccggataccgatttaatacctaatttctctgttatgtttttcctgtgagtgataacggtagtcaggctgatattcagtttatctgctatttctttgttgattaaccctttggtaatcagcacgagtacttcaatttcgcgagcagataaaagtacctgaggatgttctgcaggaatcatcggaggcatatccttcacgggatatccgttgtgatgagcatgttgatgaagtttcaggatattctttaccagtttttcttccgactcataaatattgagtaccggaacaccggaaagttggaattgcgggctgtcactggcaaggacaatcgtttttcgcttccggggaaggaagaaagcgttatgctccacatagatttgtgcggagataaaataatgggcgtacatatccggcgtatcatccattaactcattgaagttatggaaggtacggatcgttgccatagggatgatctcttccaatatggatttgagtcccaggctacagagagtattcggctcaataattgctatttcaggtttgtagttcattcttttctattgttcggatgattgattcagatagttggctactgcttccgcacaccgttctccgtctactccggcagaaacgattcctccggcatagcccgcaccctctccgcaagggaatagtccgcgaacggttacgtgttgaagcgtctctttatctcgtatgatgcggacaggggaagaggtacgtgtttctaccccgatcataacggcttcgttggtcaagaagccatgactgctgcgtccgaattgttgaaagccgagtgataatctcttgctgataaactccggcatccagaagtgaagcggagaagaaatcaaccccggactatatgaagattccggtaagtcataacttagcttcttgcgggtgaaatccagcatacgctgtgccggagctgtctggcgtctgccgccttgcaaccaacattgacgttccaattcttcctgaaagtgcagggggagaagttgggtattgaacatcgaaagttgagagctactgagagaagggttaagagcgagtagttgttcattttgttgcgcagctaactctccactttccattctcaactcttcatttatgaaatcttccggctgtatctctaccaccattcccgaattactccagcgcgagccacgattggaaggtgacattccgttcactaccacttgctccggtccgctggctgcagggacgataaagccgccgggacacatacagaaactatacacgcctctgccttcaacttgggtgacgaaactatattctgcagcagggagatattttccccttccgtttttattatgatattgtatctggtcgatcagtgttgccgggtgttccaaacggacacctacagcgataccttttgcctcaatcgttacattattagctgcgagccaacgataaacatcccttgccgaatgcccggttgcaagtatcacaggacctagaaaagtctttcctgtatttgtctcaatgcctttgatctcgttattctcaataatcaacgcatccattcttgtccggaaatgtacttctccgccacatttgagaatcgtattccgcatattttcaatgacacgcggcaacttgtccgttccgatatgcggatgtgcatcagccagtatagccgtagaagctccatgctggcagaatacattgaatatcttgtctacatttcctcttttcttactgcgggtataaagttttccgtccgaataagctcctgcacccccttctccgaaactataattggattccggatttaccgtatgttccctactgatttgcgccaggtcctttttccgttcacgcacatcttttccgcgttctacaatcaccgggcgtaatccgagttcgataaggcgcagagcggcgaacaatccgccgggacctgcgccaaccacaattacttgtggttttccttccacactattatataccgtatgctcgtattcatcttcttcaggcatttcgttgatgtaggcccgtattttcagattgacgaaaatcgttcgctgacgagcgtcaatgcttcgctttaagatgcgggtagcattgatattgcgtaaatttagtcctttctcttcagagagatattctttcagccgttgttcgttcgctgcgatttcgggaagtacgcggagttggtattcttgtatcatttggttattgttactttagattataaaaagataaggcagataacataaatcagtgtcttatccgaataacgccctgaacgcctcttctacctttcttacgggcactaactctatctttagcttcttcgtatcaatgccttgcaaattatatttgggcaacaggaaacgcttgaagccaagcttctcggcctctccgatacgttgttcaatccggttcaccggacgtatctctcccgacaaaccgatttctcctgccatacagacttccggttcgatagctgtatccatatttgaagaaagaatggcactgataactgcgaggtcgatggccgggtcattcactttcagtcctccggcgatattcagaaatacatctttctgtgcaagcttgaacccgacacgtttttcgaggacggccagaagcatattcattcttcgtatatcaaatccggttgccgaacgttggggattaccataaacagcggagcttaccagagcctgagtctcaatcaggaagggacgtactccttcgatagcagaagcgattgctactccgctcattccttcatggtcttggctaagcagtagttccgaaggattgctcacctggcgtagaccgtcctgccgcatctcataaatacccagttcggccgtactaccgaagcgattcttgatactgcgtaaaatacggtacatataatgttggtcaccttcaaattggagaactgtatcaacgatatgttccaacaccttggggcctgcaatgctcccttctttatttatatgtccgataagcaagaccggcgtatgagtctcctttgcgaaacgtaggatagatgccgaacactctctgacctgagcgatacttccgggagacgattcgatggtttccgtagagatagtctgtatggagtcgataataaccaaatccggattcgtatttttgatatggacataaatctgttcaagggaagtctcacaaacaatgaagcagtcgctggaaacctcagaaagacggtcggcacgtaattttaattgccgtgcactttcctcgccggatacataaaggattttcttttccggcatacggagtacggtttgcatgacgagagttgattttccgattcccggttcgccgccgatcagtactaaagaacccggaacaagtccgccgcccagtacgcggttcagttcattatcatgcatattgattcgcggttcatcgtccgctatgatctcactaagaataaccggcttgggcttttgcgtttctatgcccgataccggccggcggttaaccggctctttccgtacgatttcctcaacatacgtattccattctccgcacgacggacatttgcctacccatttcggtgaatcctgtccgcagttactacacacatatacggtcttttctttagccattgcattcttattagttttctagagaatacaaaagtatgtataatctgttcaacgcgcaaaacaaatcccggcaaaatcagtttattgttcaatcatccgtttccaaactcatcgttattgctgaaatgttattaactgttggacggtaaggaaagaagtcctcatcggtaccggataccttcctcaatgccggacggaacgttatatagagccggtaagtttacagagttatttctcccgctattgaacggttcatccggtcacgcacctcgtccggcgtatagccgtgtcccaacagaaacattaatttggtaacggcggactccgtcgtactgtcatatccggagacgacccctgcctgcaacaactgatatccggtttcgtaacgttccatttctacggtacctgcactacattgtgtcacgttgacaatgatgattccccgtgcactggcctggcagagcaagcggatgaaccattccttccggggagcgttgccggaaccgtacgtttcgagtactaccgctttcaatccttctattttcagaatggcagccactacattctcctgaatgccggggaaaagtttcagaacgaccacattggtatccagtaaatagtgcggtttcaattcccgttcttctccgttcacatgaatctgtacattattatatttaatatgaatccccgcttcggccagtaccggataattgaatgaccggaaagcgttgaagttttcggcatttattttggtagtgcgatttccccgcatcaaatggttctcgaagaagatacagacctccgggacaagcgcttttccttccttattctgtgcaatggcaatttcaatactcgtcatcagattttcctttccgtccgtgcggagtacccctatcggcagttgcgaacctgtcagaataacaggtttgtccagtccttccaacatgaagctgagtgctgacgcagtgtacgccattgtgtccgtgccatgcagaatgacgaatccctgatagcggtcgtaattttcgtgaatgatacagaccagcttccgccacatatccggttccatgtccgaagaatccatgggagggtcaaactggtaagtatcaattggaaagttgaatttctgcaattcgggaacgtgtttctgaagttgttcgaagttgaaactctccaaagcaccggttgtggtgttttcaatcataccaattgttccacctgtgtatattaacaatacggaagtatttaaaggatacataagctaattttctgcgattgttttcgcaaatataacaatataattgataaataagtagcaaaatgtcataaaaatgctgtctgttgattgaggagaaaagaaacgtaggattctttttatcagaaaaaaacgggaaaaagtgatagattgaatgtttttattattacttttgcgacacttatcaaaaacaagagtagaaacaaggactatgatgaagtactatccgcatacagtcacatccatgtgcaccatgaccctttggggttgagggatagtatttgtgtatctacgtgattcacgcctgtgtaagtaggcaaaattcaaattaaactttttcgtaaacaaccaatcgttctgtaaaactatacacaggacattgcattaaaataagtatcttcatgaaagtaatgaaattcggcggaacgtccgtaggttccgtgaacagcattttaagtgtaaagagaattgtagagtcggcatcggccggcgaaccggttattgtagtagtttccgcattgggaggcatcactgataaattgataaacacatcgaaaatggcggctaccggagattcggcctatgagggtgagttccgcgaaattgtttatcgtcatgtggaaatgattaaagaggtggttcctgccggagaagggcaagtggcgttgcaacgtcagattggcgaattgctgaatgaattgaaggatattttccagggtatttacctgattaaagacctttccccgaagacttcggacacaatcgtaagctatggcgagcgcctttcatctatcattgttgccgagctgattaaggatgccaagtggttcgattcgcgtacttttatcaaaactgaaaagaagcataacaaacatacgattgacgctgatctgaccaacaaactggtaaaagagactttcagctctatcccgaaagtagcattggtgccgggctttatttcttccgacaagacaaccggagaagtaaccaatctcggtcgcggcggttcggattatacggctgccatcattgctgcggcgctcaatgccgacagtctggagatatggacagatgtggatggctttatgactgctgatccgcgtgtgatttcaacggcttatactatctccgaacttagctatgtagaagcaaccgaactttgtaacttcggtgcgaaagtagtttatccgccgacgatttatcccgtatatcataagaatattcctattataataaagaatacgttcaatccggatggagtggggaccgtcatcaaacaagaagtctccaatccgcatagcaaggcgattaaaggaatttcctctatcaatgataccagtctgattacggttcagggattgggtatggtaggtgtgattggtgtgaactaccgtatctttaaggcgttagcgaagaatggaatcagtgtattccttgtttcgcaggcttcatcggagaacagtacttctatcggtgtacgcaatgcggatgcagacctggcttgtgaagtgctgaacgaagaatttgcgaaagagatagaaatgggagaaatttccccgattctcgccgaaagaaacttggcgacagtcgccattgtaggtgagaacatgaagcatacgccgggcattgcaggtaaattgttcggtacgctgggacgcaacggtatcaatgtgatcgcttgtgcacaaggcgcatcggaaaccaacatctctttcgttgtcgatgcaaaatcattacgtaaatcgctgaacgttatccacgactctttcttcctgtccgaatatcaggtcttgaatttgtttatttgcggtatcggtacggtaggcggaagcctggtagagcagattcgttgtcagcaagagaagctaatgctggaaaacggactgaaactgcacgttgtaggtatcattgacgcaacgaaagcgatgtttagccgtgaagggttcgacctcgccaatttccgtgaagagttgcagcagaaaggaaaagacagtaatctgcagacaattcgtgacgagattgtaggaatgaatatcttcaactccgtatttgtagattgtacggccagtcccgatattgcttcactctacaaagatcttttgcaacacaatatttccgttgtagctgccaacaagattgccgcttcttcggcatacgaaaactatcgtgaactgaagacgatcgcccgccagcgtggtgtgaaatatctgtttgaaacgaacgtaggtgccggacttccgattatcaacactatcaacgacctgattcatagtggtgacaaaatcttgaaaatcgaagcagtactttcgggtacattaaattatatcttcaataagattagcgccgacattcctttcagccgtactatcaaaatggcgcaggaggaacgttactccgaacccgacccgcgcatcgacctgagtggaaaagacgttatccgcaagttggtgattctggcgcgtgaagccggataccgcatcgaacaggaagatgtggaaaagaatctctttgtgccgaacgacttcttcgaaggttccttggacgacttctggaaacgggtgcccagtctcgacgcagactttgaagctcgccgccaagtattggaaaaagagcataaacattggcgtttcgttgccaaactggaagacggaaaagcttctgtcggtttgcaggaagtaggagccaaccacccgttctacggtctggaaggcagtaacaatatcatcttgctgactacggaacgttataaagaatatccgatgatgattcaggggtacggtgccggtgccggagtgacggctgccggagtatttgccgatattatgagcatcgcaaacgtttaatgccttatgaaacatattatcatattgggtgacggaatggccgattggcctgtgaagtcattaggagacaagacgctcctgcaatatgccaaaacgccttacatggataagttggcccgcatgggacgtaacgggcggttgataaccgtagccgaaggctttcatccgggcagtgaggttgccaatatgtccgtactgggatataatctcccgaaagtgtacgaaggtcgcgggccactggaagcggcaagcatcggtgtagacctgcaaccgggagaaatggcaatgcgttgtaatctgatttgtgtggaaggggagattctgaagaatcactcttccgggcatatatctaccgaagaagcggacgtgctgattcaatatctgcaagaaaaactgggcaacgaccgcgtgcgtttccatacaggagtacagtaccgtcatttgttggttatcaaagggggaaataaagaactcgactgtacccctccgcacgatgtgcctttgaaacctttccgtccgctaatggtgaaacctctggcaccggaagcgcaggaaacggcagacttggttaacgacttgattttgaaatcgcaggaactgttgaagaaccacccgttaaacctgaaacgcatggcagaaggcaaggaccctgcaaatagtatttggccctggagtccggggtatcgtccgcaaatgcctaccttctccgaaactttcccgcaagtgaaaaagggagcggtaatctcggctgttgacttgattaacggaatcggttactatgccggtttgcgtcgtattgctgtggaaggggcgaccgggctttataatacgaattacgagaataaagtagctgccgcactggaagccctgaaaacggacgattttgtttatcttcacattgaagccagcgatgaggcggggcacgaaggggatatcgacctgaaacttctcacgatcgagaatctcgacaaacgtgccgtaggacctatttacgaagcagtgaaagactggaacgaaccggtagcgattgccgttctgcccgatcatcctactccctgtgaacttcgcacgcatacgtccgaaccgatcccgttccttatctggtatccgggcatcgaacccgatgaggtgcaggtatacgacgaggtagctgcctgcaacggtagttacggtgtgttgaaagaagacgagtttataaaagaattcatgaaataagtcaccacagattatgaaatattatagtacgaataaacaagcaccaatggcttccctccaggaagcagtggtgaaagggcttgcagccgataagggactgtttatgcctatgactgtcaaacctcttccgcaagagttctacgatacgattgatacattgtcttttcaggaaatagcctatcgtgttgctgatgcgttctttggcgaagatgttcctgccgatacactgaaacagatagtatatgatacattaagttttgatgtgcctttggtaaaggtagcggacaatatctattctctggaacttttccacggaccgacactggctttcaaagatgtaggcggccgtttcatggcacgtctgctggggtacttcattaaaaaagaaggacagaagaatgtcaatgtgctggtagctacttccggtgatacgggaagcgctgttgctaacggctttctgggggtggaaggtattcatgtgtatgtgctctatccgaaaggaaaagtcagtgagatacaggaaaaacagttcactacattgggacagaatatcactgcactcgaagtagacggaacattcgatgactgtcaggcattggtaaaagccgctttcatggataaggaactgaatgaacatctttccctgacttccgccaactctatcaatgtagcccgcttcctgccacaagcattctattatttctatgcttacgcccagttgaagcgtgctggaaaagcggctaatgctgtgatttgtgttcctagcggaaacttcggaaacatcactgccggattgttcggaaagaaaatgggattacccatcaagcgttttattgccgccaacaaccgtaatgatatcttctatcagtacctgcagacaggcaagtacaatccccgtccctccattgctacgattgccaatgctatggatgtaggtgacccgagtaattttgcccgtgtaatcgacttgtacggcaattctcatgccgctatctctgccgagatttcgggtacgacttacactgacgagcagattcgcgaaacggtaaaagaaacctggaaagaacatcactacctgctcgaccctcacggggcttgcggataccgtgccttggtcgaagggctgaaagaaggtgagaccggtgtgttccttgaaacggctcatccggccaagttccttgaaacagtagaaagcattatcggcgaatcggtagagatacctgccaaattgcaggagtttatgaaaggcgagaagaaaagtttgcagatgacaaaggaatttgcagatttcaagaactatctgctttctctttaagtattctttcctgttgccgcatttttcaacgtacaggtagcagctggaagggttcctgataagggtgtgtgccaccgccttggcacgattgtgacaacgctgtgtcacagttgtgccaaggcgatggcacaactgtgtcaatggggtggaacaaacttggcacagcgatgtctgttttacataaaagcaaggaatactaaatactctcccgtgcaatgaattgtaaactcatcggaagtcgcttcattgagcgtgccttgccaccaattggtgaaatcgcttagcggataaaccaatccttctccctgcaatcctttcgctccgaaattgataatggaaatctgctgtccgggatgagctgcaaaggtttgtgtatcttttgcaggaacaaatactccataatcagtaatggtccgtacttccatgccgcttttcatataatccagcagtaggctgatatttcccaatgtatggtcttcccgtttgccggtcgctccgacaatggcaattctccggaatcctctcttttgcagataccggacggctttagtctggtcgttcgtttcctgatcgggtatctgatgtataataggggagaagcgtttgtggtattctgttgaaagagagtcgccgtcgccgacaatcacatccggagtatgtccgcgggaaatgtactcattggctgcaccgtcacagcaagcaacaaaacttgcttcttccagcattgtcagaggaacggggcaagttgggtattcaccgttggccagtatcactgcctcgggagtatagtgttcgtttatcattgtatgttcattagttttttccacttgaagtagccaaagatagctataatggagtaaagtccgtataaagctgaggtgaaatagaggtctttatagatataaagtccgcagcagacgatatcgacgataatccaggcaaaccattgttcaatgtatttgcgtgccagcatccacattccgacaatactcaaggcagtggtaaagctatccagccacggaacgttactgtcggtatattcgataagtatccatgcaatgccgataaaggcgacaataaatacaactgccagtggaaggtaacatttccatggagtgtgcacgatagggaggtctttggagcgaccggcggttggctggtctgccggccggcacttctttttccggtgtccccacatccagaaaaaccaaccgtagacagcggctatcagataatagatattgatgccaaagtcggcatacagtcccgccttgtaatatacaaagatgtaaatggcaggcatgacgacacctgctatccaaagatagatactagcccggtattccaaccaaaggtagactaaaccgaccagcgtaccgaatatttctacaaagtccagttccataatctgctgatgtcattaaaagcggaaagacacgtgtcccaagacgtttgttccggcttgtgcggcatagccggcatagtttccccggttttccactgtatcggtgtaatcgcttgaagcccaaccattgttttcatactcctcgttaaagaggttgtaaacggtgaatcccaatgtgacttctttcagaatcttcttgggacggaaggtgtacgccagattgagattgctgacaaagtatttgtcaagagtcagttcttctacttccgcattggtcatatactgtttgcttacaaactgcgattgcagggaagcctcgaagcctttataattgaaagaaaaacggttgttgagcaggaagtcaggcgaaaaagcgatgtgggtgtctttatgctttatcaggacagttggaagggaagttactgtttcatctgcgttataatgatagcccggcagactttccacaaaatccttgatgcgattcttgctccatgtggcattgatgtcccactgaaaccatttgcacggtttgataccgagcattaattcgattcccatgcggtagctgtccggaatgttttcggtcagtgcttcaccaatatcatttaaagcaccggtcaggacaagttggtcggtgtaatccatgtagtagaagttggcacctgccgtcagccatgggttggcaaacgtatatcccgcttcgtaatcaagcagtttttcggctttcgggtaggagtcgggatcgccgtccgtataattgtttcttgtcggttctttttgtgctacggagaaagaagcgtacaggcggtgattgggagttatattccagtttaagccgactttcggattgaaaaaatcgaatttcttatctacggctagcgggcgcagggcgtttttattccagtcatatttatcgtttactccatcgattgtgtaatcaatatggcggtattgcaggtcggcataagcgcttaacgtgctggtcagatcatagttggctttcagatagatattcccatcggttttctttgatttgttgcggtaatattcatgttcgggagacaggttgccgatatagtttttcacccatgtcacttttccgaagttatttccccggtatcggttgaggccacctcctaaggaagcggtcaggcggtttcctgtataattaagggagaatacacctcccccgaatttgttgtccattttcttttgtcgaacaaggtcgctttcgttagtttccgttccgtccgggttgaatggttttaacccgtattccaccaggctgcttccgggtttatattcttcataatacccgtcgcctttggtatagtgtaaggctacgttcagattccatgcggtagaaaaactatggttaagaagtagttggtagttcttttgcaggtagttgtccgtttggtccgtataataatgtttgttgccgtcggcgtcggtatacatttccccgcaaggattatatcgtcttccgaatttctccatttcctccttcgttgcatatccccaagcatgataagtcttttcttttccggcaaatgcaatcagtttgacggaagtgttctctgcgaaatatcctccttgcagatagtaagagttgaggtctactgaagcccggtcgatatatccgtccgtaccgatgttggaaagacgggcgtcaaaagtccagtggttgttcagcagtccggttcctactttcaccgtttccttgtgcgtattgaaagaaccgtaagagccgttgaactcggcatacggtttcattgccgcaccttccgtctgcatattgacgctggctccgaatgcacctgccccattggtggacgttcctgcaccgcgttgcacttgcatatcctttacggaagaagaaaagtccggcatatttacccaaaacaaattatggctttcggcgtcattcatcggtatcccgttcacggtgatgttgatgcgtgtaccatcggttccgcgtacacggagggttgtgtaaccgataccggctcccgcatccgatgtggtcagggtagaaggagtcatgctcaacaggtaaggaatatcctgtccgaagtttacttttttaagttctgcttttcctatattggtgaatgccatcggtgtttttgctgtggcacgtgtagatactacctgcacttcttgcaggttaattactttcaaactgtcggattctgcactcgttcgtgcatggacagtaatgcctacgcccaataaggcgacgacactccatactatttttttcatcttgcttattaattagttctctacgccggcattacccggatcagattctatgggtatgttctcagcccgtcatgttaaggcacccctaccagtgaatcggtgacaaaattacgccttttacgggaagaatgcaaaaaaacttttagatttgcttaaaacaatgtaactttgtcgtttgttgaaataaccaaacaacagtttattcattttaattcagataaattatgctactattatttcaagcaacagcaacacaggttgcggattctacgcaggtcgttgcagataaattaatgaaagaagcgattgctaatgccgacggcttagataaactatcgctcatcacccaacaactgctggattttgccattcgtgccggagagcgtatcttgattgcggtcatcgtctttattgtaggacgtttccttatttcaatgctcaaccgctttgtcggacgtctcatggatagaagaaaagtggatatcagtatcaagactttcgtcaaaagtctggtaaatattctgctgaccattctgttgattatttccgttgtcggtgctttgggagttgaaacgacatcatttgcagctttgttggcttcggccggtgtcgctgtcggtatggctttgtccggcaatttgcagaactttgcaggaggactgatcgtgcttttattcaaaccttataaagtaggcgactggattgaaagccagggagtttccggaacggtaaaagaaatccagatcttccataccattttgactacgggagataacaaagtgatttatataccgaacggtgcaatgagcagcggagtagtgacgaactataatacgcagactacccgtcgtgtggaatggattgtaggagttgactatggcgaagattacgataaagtgcagcagatcgtgactgatattttggctgcggacaaacgtatcctgaaagatccggctccatttatcgctcttcatgcattggatgccagcagtgtgaatgtagtagcccgtgtatgggtgaacagcgccgattattggggagtttattttgatatcaacaaggcaatttatgccacctttaatgaaaaaggcattaacttcccgttcccgcaacttacggtacatcagggaaattgataattctacgctatatgcaaaaacgagagagtttcacttcggtgaggctctctcgttttatagatgaaaaattgtctggtgtgattggaaaaggaatttcttttattttatgccgaaatcttcggccagttcgtatctgtcttctttcatccccagcacatggttgatctttcttcttttctccagatccttaaaatagttttccaccaccatgtaaaggtcgaaattagtggttgaccctgcggccatatcgagtgattccaccattttttctactgcttggtgaattttctctgcgtctatcagatgcagttcgttgctgtgtattaaatatttttccatgactgcaatgttttaatgttatattagtataacgttcggcagtcatggaaagttcagtgttccggactagactctagcaagtgcttgttccaaatcggcaatcaaatcgtcgatatgctccgtgccgatagacaaacggacagtgcccggataaatttcctgttctgcaagttcctgcgcgttgagttgcgaatgagtggtacttgccggatgaatgaccagtgattttacgtcagccacattggccagtaaagagaaaatttccaggctgtcaataaagcgatgtgcttcttcctgtcctccttttatttcgaaggtgaagatagaacttgcaccattcgggaaataacgttgatatagtgcatggtccggatgatcggccagtgaagggtgattgaccttctttactttcggatgattgttcaggaagcttactacttttaatgcgttttctacatggcgctctacacgcaatgacagcgtttcgagtccctgcaacagaatgaaggcgttgaatgggctgatagtagctccggtatcccgcagtagagtggcacggatacgagttgcataggcagccggaccggcagcgtccacaaagcgtactccatgataactggggtcgggctcggtgagttgcgggaatttgcccgaagccacccagtcgaatttaccagaatctacgattactcctcctagtgaggtaccgtgtccaccaataaactttgtggcagagtgtactacaatatctgcaccgtgttcgataggacgaattaagtacggtgtgccgaatgtattatcaataatcaaaggaattttatggcggtgagcgatttcggatactgcctctatatcgataatgttggagttagggttgcctaatgtctctataaatacggcttttgtattatcctgaatagccttttcaaaattggaaaggtcgctcggatcaacaaaagttgttgtaattccataactgggcaaggtatgtgccagcaggttgtaacttcctccgtagatcgtcttggctgctacaatatgatcgcccgcacgggtaatgttttcgaaagcataagtgatggcggcagcaccggaagcaactgccaaccctgctactcctccctcaagggcagctacgcgttcttcgaaaacgccttgtgtagagtttgtcaggcgtccgtagatatttcccggatcttgcaggccgaaacgtgcggctgcatgagcggagttatggaatacataggaagttgtctgatagataggtactgcacgggcgtctgttgccgggtctgcctgttcctgtcctacatgaatctgtaatgtctcgaagtgtaagttctttctttccataatcgtatgtttttaaagtttaatattttgtctttattttcttgcaaagttagacagcgtaggaatatcgaacaatatatagctgaaatatagaaaataatactatttttgtaccgttatatagaataaggatgctgtcttgttctcgatattcaccctttagaagaatatttttctatggatacttttgataaattggataaagtggatttgcagatactccgtactctgcaagagaatgcccgattgacgacaaaagagttggctgcacgggtgagtctttcatcaactcctgtctttgaacggctcaaacggctcgaaagcggcggatatataaagaaatatattgctgtgctggatgctgaaaagttgaatcagggattcgtcgtgttttgcagtgtgaagctcagacggctgaacagggatattgcagcagagtttacgcgaatcatacaagatattcctgaagtaaccgaatgctataatatatcgggaagttatgattatctgctcaagattcatgctccgaatatgaagtattatcaagagtttattctaaatgtactgggcactatcgatagtctggggtcattggaaagtacttttgtcatggctgaggtgaaacaccggtatgggatacatatttagtgctctaaatatgttatgtagcatacttaacttctttttgcacattcatagctccattttatagcaacatccctaattttatccaaaagctggaatggtatttcaaatatggaaaacagattgccaaatatggaaaatacagagcaaagtctggaaaaaatagacgataattataaagtgcccaatctggaaaaaggcattgcggtgattgaatatctttcttcgagatcggaaggagaaacattgcaggcaatcaaggtggcacttgatatatcacagactaccgcctaccgtatcttgaatacattggtacgtttggattatctttctttcgatgaagatacgaagcggtataaattaacccggaaattgttaactctgggattccgttcgttgaatgaacataatctgctggaaacagtcttgccacatttacgtgatttgagagacagggtgaaggaaacggcctgttttggcgtattgggcgatgaaaaaggtatttttatcgaacaagctcgaggagatcacgctttttgctttgtcctgtcacccggtaaaccttttgaactgcattgttctgcgccgggaaaagcaatcatggcctatctgccggtcactgtccggaaccgttatctttcttatatgactttccctcgttacaattcccgtactatcacttcgcgcgaggtttatctggaagaattggagaaggtttatcaacagggatacgctttggacaatgaggaagaattgagcggggtgatttgtgtaggcgcacctgtcttgaattatacaggatatccttgtggctctatctggatttcgggaccgaaagaccgtttgacggaggagcagttgcgaagtacggtgcagattgtcaaagagatagccggacaaatctcagcagaactaggatatagaagagtataacaaaagatcatgctataaaaatacgaaacattatgataaggaactttttgctaatttgcttgctcggttgcggcatatctttggcaacagccggaaaccctcctttctttactacaggtactgctgttaacgagaaaggagaattattgatgacccagaaaggaaccagacagttggatgtatttgctgccgacgggaaaactttgctccgttcgtacccgtttaaggaaactcccacaggagttttacttgatggtgataaagcgtatgtgactactttcgagaaaaccgggcggttggaggtcttgtcgttgaagtcgggacagatagaagcagctattcctaccggttcgggagcttgctatccgatattctcggcggacaagaagcatatctatgtatgcaatcaatttgcaggtacagtaagtgagatagatccggcaacgtgtaaagttgtcagaagtgtgaaagtcttacgcgaaccaaggtccgctatattcagtaaggacggacgatatctatttgtggctaactttctgccggcacaaagggcggacttgaacatagtggcggcttgtgtatctgtaattgaagtgaaaagtttcactaaagtaaaggatatccaactggcaaacggcagtaatgctttgcgggatatgtgtattactcccgacggtaagtatatttatgtatctcataatttagggcgttttatggtacctacctctcaattacagcaggggtggatgaatacaagtgctttcagtatcatcaacgtagaaaagcaggaatttgaaggagccgtattggtggacgaacccgaccggggcgctgccggtgtgtgggggattgcctgtgatgagaagcacatctacgtagcccatagcgggacacatgaaataagcgtaatcgaccattcccgaatgttggataagtttcggaattatgcggataaaggtcgtttggactatgacctgacttttctttacggactccgcaaaaggattcctttgcagggcaacggaccacgtcatcttcttctctcgaataataaactgattattcctacctatttcgccgatgtattaaatatggtagatctgaatacgttctcggtggctgccgttaatatgaatgtggggcgtaccgagacgaaagaacaaaaaggagagaagtactttaatgatgcgggacattgttatcagggctggcaaagttgtaacggatgtcatcccggagacggccgtacggacggtatgaactgggatttgatgaacgatggagtagggaatcctaaaaactgcaagagcctgctttatagccacgtgacgcctcccaatatgatttcgggtattcgtgccaaagctgaagtagctgtacgtgcaggattccggtatattcagttctatgagccggaagaagaaatggccgaatgtgtggacgcgtatatgaagtctttacgcccggttccgagcccgtatttagtagatggagaattgtcggaaaaagcgaaggcgggaagaaaagtctttgataagttgaaatgtggcgattgtcataacggtcctttctatacggatctgaaaatgcatcggattggtgaagatgtcgagtttgagaaaggatgggatacacctacgctggtagaatgttggcgtacggctccttatttgtttgacggacgtgctgccactatgcaagaagtgttcgaagttcacaagcacggaattgacaagaaagtatccaagaaagaaatagaggaattaactgaatatgtaaattctctttaagaagaaagtgtatgaactattgtgataaaatacattactccctgttgactgcttccccggaagattttccgtcgatgatagacagtttattgtcccggttgcccgaagaagaacgtatactacgtttggtcttgttcggtacgccggttttaaaagatgaatatgtcactcaacgtcagctattcaaagcgaaagcgcgccatttctttggagacagcgaaccggctcttagttatgttctgcaacccgtaccggatgctcctttagtcatggaagtacatagctatcgtcctgaaagcgatgaacggattttgtatcggcattatgataatattccttacgtattgttggaaaatgagtcgggacgtttcatgtttgccggaggatttcagggcgatgacccttgtgcagatatggaacagcggtcggtagaggccttccgccagttgaagggagttttggagaaagaatcgtttcctgtcaacagcattattcgtcaatggaattatatagaacaaatcaccggatatgacggagccggccaacattatcagtcgttcaataatgtgcgtacagcgttttatgcaggaagtgattggtcgaacggctatcctgccgctacgggaatcgggatgaacatgggaggtgtgctgattgatgtggatgcggcaatgtttcacactcctgatgtttttgccactcctattgataataaactgcaagttgctgcccacgcctattccgagcaggtgcttgaagaagcccggcagaaaaaaacaaccccgaagtttgaacgggccaagagtatgactttccgggagcgacgtctggtttatatctccggtacagccgcaatcagaggagaagaaagtctgaagggagtcggtttggaacgtcagttgcagattactatggagaatatcgctcaattgataggtgatgcccgtttggttatgttacgtgtttacctgaagaacgagtctgattatgaagaagctcgcaggggacttgaaagttatggactgaatattcctgtttcctatttgcgggctggcgtatgcagggaagaactattgattgaaatagagggaatagcgatagattaaatacggaaataatattaataataacagataaagctatgactaatttgaaaaagtacacaaatgccgatttctacaagaacggtgtatttcagcaagagattgccatagaggcaatgaaagaaatgtttgtccactataacattccctttaccggatttatggccgagaatatgtgggtaacggattttggtctgggagactttgaaaatgtgggtatgggaggtatcttttgggtgaatgacccgaaatatggttactttgctcatgccatttatttgcttccgggacagatgattcctgaacacgctcatgtgaaaacagactttccggccaaacatgagtcatggatggtggagaaaggttgggtttataatttctcggaagtaggagaaacgactccgaatgctccggtgattcccgccacacatgggcctgtcaaaagcaagaattgcgtgatacagaaagtaggcgatattttgcgattgaaagaaatggagacttttcactttatgatggcaggtccggaaggtgccgttgtttgtgaatgggcaaactatcacgataatgccggactgcgtttcactcaccctactgctacgttatgaaaaactggtaccgcatattaatattgtttttagtatcttcttctttgctgacttttacagccgcagctcaacagaagaatactgatactgagcgcgcgctcgtcttgaaactggctgcctacctgaaggattcttcttacataaagaatacgattcgacaaatagagactgaaaagaaagtcgaaacccaaatcaccggatatcaaaaacttcataagcaagtgcaacgtatgcttctgttgcaaagcgaattgaagtggctgaatatggaagcgattcgtctggcttatgaggacatgaagcggatcgaaggcttcgatgcagtaaagtacctgcctattttgaccgaactggaacagcaagtaaagcagggattcggcaatatatatagcggtgatgaggctgttttggcaaatgcggaaaaggccgtagccaataagcgtgctattttactggccaatccattgttgaacggcgataagatattgaccgttcgttatcaactgggaaacagggatcgtcgggcaatggctcccgaactgggtacgcagtcgaacaactggagtaatcaggaatcagcccgccggaaaggttttaacgccgatattgttgagttaagtaatttgcgtgatgaagtacaaatccgcactatttataagcctgacaatacttcttccattgccgatttgaaactgcattgggatggagaccgtgcgatgtttacccagacaatgtctgacaatcgttggaatgtgtttgaagtaaaactgaataacggcgattgtaagaaattgattgataatcccgaacctgatttggaattttatgacgggacttatctgccggatggacgtatcatagccaattcgaacatcggttaccagggagtaccctgtgtcaatgggagcgaccctgtaggaaacatggtactttatacgccgcagagtaaaaatctccgccgtctgacatttgatcaggatgcaaactggaatccggtgattatgaataacggacgtgtgatgtatactcgttgggaatatactgacctgactcactattacacccgtattgtgatgaacatgaatcctgacgggacggagcaaaaggcactgtatggaagtggtgcaatgtttcccaacagtacatttgacgtgcaacctttacccggttatgcttctgcctttgtcggaatcatttcgggacatcacggggtggcacgttcgggacgtcttattctgttcgacccggcaaaagcgcgtaaaggagccgccggtatgttgcaggagattcctcatcgcaaccgtcccatcgttgaagaagtgaaagacaggttggtcgacggggtatggcctcaatttatcaagccttctccactcaatgatacttattttctggttgccgcaaaattggataagaatgatttgtggggtatctatctggtagataagtttgataacgtgacttgtctgcataaaatggaaggggaaggatatatcagtccgatagccgtgcgcaaaacggtgactccgcctgctatacccgaccgggtgaaactggacgataagcaggcaacggtctttatacaggatatttatgaaggtgaaggattgaaggggattccgcgtggaacggtgaagtcgctccgtttacacgcttatgagtatgcttatgtccagacacaatctgaccataactggcatggtatccagtcgggttgggatattaaacgtatgttgggtaccgtaccggtggaggaagacggctcggttatttttaaaattcctgccaatactccggtttctatccaacccttggataaggatggagtggctgtacaatggatgcgtagctggctgacagggcaaccgggagagattgtctcttgtgtgggatgtcatgaagatcagaaccagattgtaatcccgaaacgtgtgattgcttcacagaaagcaccgcatgctctcactcccccggaaggaggaacccgttcatttacttttgatctggaggtacaacctattttggatcgtgcctgtatcgcttgccacaatggtgagggaaaagcattcgatctgcgtgggggcaagaaagatggcaagggatatggaacatcctatctcaatcttcatccttatgtgcatcgtcagggcggtgagggagatatggtggtactttatccttatgaatatcatcctaataccagtgagttggtccgtcttttgaaaaaaggacattataatgtgcaactgacggatgcggagtggaggaaaatttataactggattgactataatgctcccgacaaaggatatttcaatgctaatgttctgaaatcgttcccgtatcagggatacgaccagatagaacgccgcaagcaactgaccgataaatatgcgggcggtgccggagtggattggaaaaaagagattgccgattatgctgcccaactgaaaaacaaaggtgagataaaaccggtaatgcccaagaaggtgagtcctgtgaaggagaaagtcctgaaggtaaaagggtggccgtttgctccggacagggtaaaggaaatgctagccgatgagaaagagaccgttaaggtgttggaaatagctccgggcgttcaaatgacatttgtacgtattcctgcgggtgaatttgttatgggcagttaccatggggagccggacacttatcccactaccaaggtgaagatagataaagcgttctggatgggcgaactggaagtgactaaccaacagtataatactatattcccgcagcatgacagccgttatgtggatcaacagtggaaagatcatgtcgtaccggggtatccggctaataaaccggagcagcctgttatccgcgtaagctataatgacgcaatggaatattgtaagatattgagtcaaaagaccggactgaacattacgcttcctaccgaagcgcaatgggaatgggcgtgtcgtggaggaagcgacgaggatttctggtttggtaacttgaatgcggatttcggtaagaaagataacttggccgatgtgacaaccaacaagtttgcagtgagtggagtcgatccgcagccgatgtctcccgaatcgccctggtacaagtattatacgttccttcctaaagcagccaatgtggatgacggaagtttggtgcaggtaggaggaaagaagtatgaggcaaatccgttcggattatactgtatgcatggcaatgttgccgaatggacgcgttcggattatgtcccttatccgtataaagagaatccgaaaaaggtttccgaatataaagtggttcgtggcggttcgtatattgaacggccgaaatattccacagcatactcacgtaagggattctatccttatcaatgtgtgtttaatgtcggtttccgtgtcattatcgaagattaatcgaatatactaatgaaagctactctgaaaagactgatttcctcttcaacaacgactattgtgttgttgcttgtatatggcgcaggtttggcgattgctacttttattgagaagtatcaggggagtgaagtagcccgatcggtggtgtactgttctcctttgtttttccttcttcaatttttgatagtactcaattggttggctatcgttatcaggcaacgttcgctgaaaatgcgcaaatggggaatgttagttactcacggggctttcattctaattctgctgggagcattggtatctcatctttatggtgaggaaggtattcttcatttgcgtgagggagagacgagcaatcgcttcgctgtccgtcacgccggtgaagtgacttaccatacgctgccttttagtgtggaactgataaattttacattaacccgttatcccggttcgtccagcccgtctgcgtatgaaagtgagttgctggtacatctggatggagaagtcatttcggaacgggtttatatgaataatgtgctggatgtgaaaggttatcgtttctttcaggcttcttatgatcaggatgaacagggtacggtgctttctgtcaaccgtgatgtggctggacgtaccatcacttacaccggatatgctgttctgttgctcggtctggtattgtgttttgtagacaggcgttcacgctttatgttactcagccggcggttgaaggagttgcgttgttcgttcttccttatgttgttgacgctctcttctttgacggttcatgccggtgagacctcgatacaagcgagggaggcagtgctgaaagacgtcattgatagcgggcatgctgcccgttttggtgcattgccccttcagtcgggaagagggcgtgtacttcctgtcaataccttctcgtctgaagtattgaggaaactgcataagtctgattccttttattctttaaattccgaccagtttcttcttagtgttttgacaatgccggaacgttggacgtatattccatttattgctgttcccggcaaggaattgagtgacttttatcagttgccgtccggacaatgcgcctatatggatgtatttgatgcggacgggaattataaattgcagaagaagttggaagaagcatacggtaagatgcctgctgcgcggactcgttttgataaagacctgattaagtttgacgagcagattaacatctttcatcagttgcttaattggcagctgttgaatctctttccgaaagaagacgacccgcaacatacgtggtatgctccgggggatgatttgtcggctttttcgggaaaagactcgatgtttgtctcccgggtgttggcttggtatgtggaagaagtacagacttccttgcagagtggcgactggacaaagcctgatgaaatagtaggtatgatttccacttatcaacaggcaaagaataagatagccggtgtcacttccgggaaaatggaggcggagataaaatataaccgtttggatgtgttcagccagtgcaagaaaggatatctgatttttggcgggttattgctggtgtttgcttttgcttctttattcaagcgtgcccgttggatgcgttgggcaagtcgggcacttggtgtggctgtcctggcggtttttcttttccatacgtacggaatggggatgcgctggtatattgcaggatatgctccatggagcaattcatatgaaacaatggtctacgttgcctgggctacggtttttgccggttggctgttcgcgcgtcgtagtctgctgactttcgctttggctacgttgttcggtggagtcatcttgtttgtatcgggactgaactggatggacccgcagataaatccgcttgttcctgttctcaagtcgccgtggctgatgtttcatgtagctgttattgtaggtgcatacggattcttcggtatcagttgcctgctcggactggtcaatctggtgatgatgagtcttaagaaggcagtgctggcacagcggataaaagaattgagtattatcaacgaaatgtctcttctgattggactggctttgatgacgataggaacatttcttggagctatctgggctaatgagtcgtggggacgttactggggatgggacccgaaagagacgtgggcgctggttacgatgatcgtttacgccattgtcactcatcttcatctggtgccgttcagaaacagcctatggctgttcaacatagcttcggtagtcgctttttacagtgtgttgatgacgttcttcggagtgaattatttcctgagtggtatgcattcctatggacaaaacgaccatgtcggaggaatgtttgtctatcttttgctgtcggcacttttggtcgcgctgattggatttatctctttcgcgagaaggcagaaacagaatagctaatcgaatgtaatgatgtgtagtatgaagaattttatattgttagttgctttattccttgttgcaccgtttgctcaaggcagttcccctcagcatctgttggtcggtggttccggctggaataagattgccataatcaataaagacacaaaagaaatagtctgggaatatcctctggaaaaaggctgggaatgtaactcggtggcagccacgaaagcgggagaaattcttttttcctactccaaaggagcaaaaatgataacccgtgacgggcgggaactctggaatatcgccgcacccgcaggatgtgagatgcagacggcacgtatattgccggacggtaatgcattagtagcttggtgcggtcatccgtctaccattctggaggtaaatatgaaaggagaggtcctttctaaaaccgagtttgaaacagggatcgaacgtcctcatgcacaattccgtcaaataaacaagaataagaaaggcaattatcttgtgcctttatttgccacctcggaagtgcgcgaaattgcccctaatggtcaactgctgaatagtgtaaagctctccggtactcctttttcctctgcttttctggacaacggagactgtctggttgcttgtggagacgctcattgtttcgtgcaactgaatcttgaatcgaaccggattgttcgccgggtgaatgccaatgacatagaaggtgtacaactcttttttgtagcccaactctttcctttgcagaatgggggactttatatctgtaactggcaagggcacgaccgcgaagccggtaaagggaaacacccccagttggtcgagattgattcggaaggcaaagtggtgtggcaactgaatgataaagttaaattcggcatgatttctactatttgtccgattcgagaatagtgtcggaccgtttattttgtacatttgccgggtgatataaatcctattcttctaacgcaatgaaatggcaactctgtaaatagcttcgcttatatggatggtgaataacggaaagagctgttgtccccaactgtctgtggctttacataagtcgcagggtgttttgtcagtctatatcggaaactatataaaagaagttataatacaatgaatacgaaagtatatcctcgcaccaatgattttcagactatctatctgaatacagtcataaagaatcctgccattattgtaggcgattacactatatataatgattttgtaaatgacccgcttgattttgagaagaacaacgttctatatcattatcctattaacaaagaccggttgataattggtaagttctgttctgttgcttgcggaaccaagttcctttttaacagtgcgaaccataccttgcgttctttatccaattatacattccctcttttctttggagaatggggcttagataaagaagatatcgcttcggcttgggacaacaaaggtgatatagtgataggtaatgatgtgtggatcgggtatgaagcagttatcatgtccggagtgcatgttggggatggagcggtcatagcatcacgggcagtagttacgaaagatgtgcctccttatacgatagtaggaggaacgcctgccagggagatacggaaacgtttcgatacccatacaatcactcaattgcaggaattgcaatggtggaattggagcatggaaaagatatcgagatgcctgccttgtataatggacgggaagatggatgaattattggaatttcgaccatgacttgattgaaacatgatatgtttttcgtttcttcatacgtccgataagctgattagtaatggtcggctctgcctctctggtatcgggtaaaacattgataaataacctaatttgaatcaaacatttttccatatcggttcgtttaataaaaaacgaacttaatatgtgtcaggtatgaaatcttttattttaatggtgatagccatggtgtgtgcggtttctttggaagcacagagtaagtctttttatgacttcactgtgagaacaattgacggtaaggaatttcctctttcatctttgaaagggaagaaagtgctggtagtgaatgtagcttccaaatgcggactgactccacaatatgccaagttgcaggaattgtatgagaagtataaggataagaactttgttattatcggcttccctgctaataattttatggggcaggaaccgggaagtaatgaggaaattgccaagttctgttcattgaactatgatgtcacttttccgatgatgtccaagatttctgttaagggcaaagatatggcaccgctttatcaatggctgacagaaaagaaacagaatgggaaagaggatgccccggtccagtggaactttcaaaagtttatgattgacgagaacggaaactggattgggttcgttacccccaaagagagtccgttctccgagaaaatccttacttggatagagaagaaataagggatactttcttcaactcctcttcaaagttgggagtgaaaatgcctttgcctaagttttcttttatttctttgaccgtccaaaaccgtcctccgtccagttcgtcgctggggtggatctcaccgtcgtaaactgttttatgaacaaatacgagctctttttcacgttcggactcgaacacataatgagtcagaagttcaggagtaaagtccgtgatgcctaactcctcacggacttcccgcttcagagctatttctacactttctcctaaatcaatatgtccgcctacggctgtatcccatttcccgggctggatgtctttccattcgggacgtttttgtagatacaactctcctttggtattgaagatgtgcaggtggacaaccggatgaagcaatctgctgccactatgacattctccacgagtggcggctccggtgatatttccctgttcattgacaacgggaaacatttcttggttattatcacttggcataatagtcgctattattttcttatcagcaagattatatcgtaacttacaatagatatttttacggtattaataaggaagaatctccataactcaggaatctgaaatcgtggctcagggcataatcgtaaatcgtgcgccagttccctttcacgaaagcggaaaccaatagaagcaaggtactttgcggctggtggaaattagtaaccattgctttcactattttatactgataaccgggagctatgatgatctgcgtactggtatgaagtgcttcaagcccgtttctgtcgagataccccaatatcttttgtagggcaacaaccggaggaatctggtcgtacttttcgtatggctgccattgtctgacgtgcagttcctgttccgtagcgtccggatgatcggccaatgtgacccctatatgatacaagctttcgagcgtgcgcacggaagtggtgcctacggcaatggcgcaaccgtcatggtcgatcaatttcttgattgtattccggttgacggatatatattccgtgtgcatctcgtgtccttcaatttcctcgcttttcaccggcttaaaagttcctgcccctacgtgcaatgtcagttcctcaaggtctatgcctttttcctgcaatgcttccagtactcgcggggtgaaatgcaatccggcagtaggtgcggctaccgaaccttttattttggagtaaacagtctgatatgtttccttgtcgctttcctccgtattccggttcagatagggtgggataggaagctctccgaacacttcgaggatatcggcgaaagttacttcggggttattccatgcgaagtctacccaatggctggtacctttgcattctcctctcgttgctgtcagagtaataggaaagcctttgacggtcatttcccgtttcagtgtcccgtccttccatttcttcagattgccgatcatgcagagccatgcggcgtgttccgtttgctggaagttcagtacataatcattgggctgaatcggttcgagacagaatacctcaatcagtgcacctgtttctttgcggaagtgaaggcgcgcctggatgacttttgtattgttgaatatcattaggcttcctttcggcagatattccggtaaggaagtgaaagtatcttcggtcacttcaccgtggcgatacaccaatagtttcgactggtcgcgaacgggtagcgggaatttggcaatacgttcatccggcaatggatagttgtattcgctaatatggatatgtttcggattctctttcattgttgcttggtataataagttctatttgttgcttgtcccatattttttagctttcatcctggaataaaaagaaagaggttagattttactctaacctcttgaagatcaattcgtcgggatgacaagattcgaacttgcgaccacacgccccccagacgcgtactctaccgggctgagctacatcccgaattgcggttgcaaaagtactgattaatttttaaatagcaaataatttgcttgatttttgttttatcaattcacttgaataaggtttctaactgttatagagctaaaagaatgaggctcggtgaagatagggatgacaaagtattgcgcagcttcttcagacttgccgtaaaccaattgttggacattaggagaaaagttcctctccattcatagtaaacttccaattatcaagaaacaaagttgtttttcattaattgcaatctataaatgaaagttccgtttttataaatgaaacttgcgtttgtaaaaacggaacttgcatttataaaaacgaaggcttcgtttatagtttgttgccggtgcacaatcagtttagtatcaattaatggcaagtttactgtcaatcagaaagaaatttgttgttaatagatgagttgctatatacttgttctcatacgtgcggcattagctatttctttgtttttgaatgccataaaaaacttttctgtttataataaatctaaatacagactggggtaaagaactaagggaggggcgttttgtttataaaataatgcaaataattagtatgtaatttcctctgtataatactttatttccttttttaacgaatggtaaatttggatattatacatttgtggaaagtctttaagagagaggtgataaatgcaaaacaacaaaaacaaagaaacgttagagatatatgtcttaggtgacgatttcaagtattatgagaatctgaagtatcttcctttaacttcttatccttctaatattcaatcagctttgattgtatatagtttgagaggaacggctaaaatcagtgtgcacgaagacgtgcattggatacaacctgatgagttaatcatattgttgcccggacaatttgtttcattcagtgaacctagtgaggactttttaactgtcacaatggtaatatcttcctctatgttcggcgatgccctaagtggtgtaccgcgcttttctccgcatttctttttctatatgcggagccattattattatcctcagaatgaacgtgatgttctgcggatatataactatttgggaatgataaaagataaggtgatgtctactgacgcgtacaggagggaattgattattcatttactgaggtatctgtatctcgaactgttcaatgcttacgagaaagaatcgatgttggtgaatacccgtaaggatacccgtaaagaggaattggcaaataaattcttcagccttatcatgaagcacttcaaagagaataaggatgtggctttttatgcggacaaattatgtattacttccaaatacctgaccatggtaatcaaggaaacgagcggaaagtctgctaaagactggattgttgaatatattatactggagataaaggctctgttgaaaaacacgagtctgaatattcaggaaattgcgattaggacgaactttgctaatcaatcgtcgcttggacgtttttttagaaaacatacggggatgtcattgtcccagtatcgaatgagtcatttggattgagaaagtggggatgattgcgatgcaattatcaatatatatgggagaataagggaatcaagaaaggggagtggtgttgaagccattccccttatatttttatttttgtccggactgggtcagattcccatgcattcacggtagaagtccagcatttcgaaaattgtatctttgtcggcgatctgattgatacggatgtctccgatatctttcagcagtgtgaagttgatggtgccggaagtgttcttcttgtcatgtgtcataaacgcgtatagttgctcgtacttcttgcagtcgaatgtgaatacgccatagttgtccttgataaattggatcgtctgacgcatcttctcttttgggaaacctactttgagatgggatagatacagttcgcagacaattccccaagctactgcatatccgtggagtacgggacggttttctgccagtgccatactttcgaatgcgtgtcctaccgtatgtcccaagttcaaggccttgcggattccatgttcaaacgggtcctgctctacgatgtcttctttcacttgcaccgaccggccgaccagttgcttgagggcagtataatcaatgtccgaggtattgaaattcagtaattcggcccaatgtgcagtattgctgattagtccgtgtttcaacatttctgcatatccggagaagaaattatgtgcatccagcgtccgtaagaattctgtttcgattaatacgctgtttgctggggcaaatgagccgatttcgttcttcagtccgttgaagttgattcctgtcttaccaccgacagaggcgtctaccattgccagtaaagttgtcggtatattgatgtatgcaataccgcgtttgaaagtggcggcggcaaaacctcccaaatcggttaccattcctccaccaaggttgatgagcaatgagtggcgtgtagctccctgggtacttagtgacatccatacggaagccagtgtctctagtgtcttatgcacgtcttcggctccgatgcagatttcaatcgcatctttcaatgcggggagttccttcaaggcaggcaggcagagacgccgggtatgctcgtctgtgaggatgaataatttgtcatgcggacactgttctatggcgcggctaaggcttgtttccaagctttcgcagagaataacttcttgtttactcatgattcttttgcttttttactttgcaaatgtatataaaatatctttttttacttacttttgtctcgttaaaacgttcaaatcatgaaagcattattacccgtattttgtcgtcctgtgggatatttggtcttgttgatagctctgttcattcttcctgtgctgtatatacaaggaatggtgaccgatcataatctgttattttataaagaatgtacgaagttgctgatgatgtcaggatgcttgttgataatctttgcattaagcaagaatgaaagccgtgaaacggagcagattcggaatgcggcggttcggaatgcagtctttttgaccttcctttttgtattcggcggaatgttgtggcgtgtcattcaaagggatatcattaatgtggatacttcttcttttctgacttttttggtatttaatgtgctttgtttggagtttggtctgcaaaaagcgcgtgttgatcgattcttcaaaagataattttcctttcaattaaaccttttacgattcaatttgtcaaaaagacattgttattgctactaatataatcgtaatttaggtaaatgaaaagattatcagtcgggttggtgctgatgttgttatgcaccctctctattttcgcacagaataaagtgatttctgtttcgggacgtgttgtggaatctgattctaaggagccggcagcacaagccaccgttcaattattgtcgttacccgatagtgcttatgctgctggtatagccagtagtaataagggctggtttacgcttccgaaagtgaaagccgggaaatatctgttgaagatttcttatatcggtttccgtacaaagtttgttcctgtacaattgtcaaacaatgttcctgagaaaaaaatggggaatattgctctggaacctgatgctgtgatgttgagtgaggcagtgattacggggactgctccggaggtgacggtgaaggaagatacgctggagtataattcaacggcttatcgtactcctgaaggtgccatgctggaggagttggtaaagaaacttccgggagcggagattgatgatgacggtaacgtcaaaatcaatggtaaagaagtcaagaagattatggtggacggtaaggagttctttggcggtgatgtgaaaaccggtttgaagaatttgccggtcaatatgattgacaagttgaaaacatacgataaaaagtccgacttggcccgtgttaccggaattgatgacggagaggaggagacggttcttgacttgaaggtgaagaaaggaatgaaccagggatggttcggtaacgcgaatgtggcaggcgggactgaaagccgttattcaagtaatgtaatgctgaaccgttttgttgaaaacagtcagttctcattgataggatcagccaataacgtgaatgaccagggattttcgggcggaggaggccgaccccggttccggaatagcaacggtttgaccgccactaagatgctcggtgcaaactttgccacccagacggataaactggaactaggcggtagtgcccgttataattttagtgacagagacgctatatctactaattattcggaacgtttcttgcagaatggcaactcctattctaattcgaacagtaaaggtcgtaataagaatactaactttaatgccgattttcgtctggaatggaaaccggatacgttgactaacattattttccgtcctaatttttcttatggaaaatctgatgggtattcgatttcagaatcgggaacgtttaatgaggacccttttaaccttgtgtctaatccgaatgcttttttgaataaggtggtatgggatagtgaggatgaccctttgaaggatatccgtgtaaatgcgagtaacagtgaatctatgtcagagagtaagagtctttcggctaatgcttctttgcagttgaacaggaggttgaacagtctgggacgtaacattacattccgtggtacattcagttatggtgataacgacagtgagtcgtttagtgaagcattgacgcgctattttgacgcagtggccggaaagccggatgatgataacaggcggtataccacatctcctacgaagaactatgattacacggcagaattgacttataacgaaccgatagcgaaagctacttttttgcagttccgttataaattccaatataaatatagtgaaagcgacagaagcacctatgatctgataccggatgctgacaaaggtcaggtttgggactggcattttggtgacgaacttcctctgggatatgagaataacagggatcaggatttgagtaaatatgccaagtataattattataatcatgatataaatgcagggttgaatcttatcagagaaaaatatagatttaatgtcggagtctctctgcaaccgcagaatactacgttgacttataagaaatcggaacttgatactattgtgaagcggtcggtcttcaactttgccccgaatattgatttccgttatcgtttctcgaaggtgagccaattgcgctttacttatcgcggacgtgcgagccagccaagtatggagaatttgttggatatcaccgatgactcaaacccgctgaatatccgtatgggtaacccgggattgaaaccttctttctctcataatatgcgtttgttctataatacttataacgcggacaggcagcaggggatagtggcacatgctttcttcaatgctacccagaatagcattaccaatggtactacttataatcaggctaccggtggagttactgtgaaaccggaaaatatcaatggtaactggaatgcgtcgggaatgttcggatttaatacggctttgaaggataaacgatttactgtcagtactttctctcgtgtcggatatacgaatgcggttgcttatctgtataatcaacagacaactgtaaacgataagaatacaagtactacattgaatttaggggaagatgtgagaggtacttttcggaatgactggtttgagtttacggtgaacggttctataaattataactttgagaagaataagttgcgtccggagaataaccaggaaccgtacacttttggttatggtgccagtacgaatatcaatatgccttggaatatgtcattgtctaccaatatcacgaacaatgcccgccgcggctatcgggatgccagtatgaacagaaatgaacttatctggaatgcacaaattgctcagagtttccttaaaggtaatgcggcaacaatcagttttgagatttatgatatattgaagcaacagactaatatcagccgttcattgactgccgatatgcgttctgtttctgaatataatggtgtaaatagctattgtatgcttcattttatctatcgcctgaatatcttcggaaataaagaagctcgcggaaatatgcgtcacggaggttttgacggtggtggtcatggtcctcgcggtggcggaatgcggcccatgcgtttctaagccatagcaaatatagaatagtgaagtcccggtgctgcgatgatgagttgtcaccgggacttttttgtttatccgataatttactttatatttgttgttccgtagctctataaagaaggagatttctatgattgattggaactatatagtgagtcagatagcaactgtggcttttgatatactctatttcggagccattatcagtacgattgtcattatcattcttgacaatcggaatcctgtcaagactatggcttggatactcatcttgcttttcctgcctattgtggggcttgtcttttactttttcttcggccggagtcagcgtcgggagcgtataatcggacaaaagagctacgaccgcttgttgaagaaacctatggcggaatacttggcgcaggactgttccgatattccctatgaatactcccgtctcatccagctttttcgtcataccaatcaggcttttcctttcgaggggaacagggtgtctgtctatacggaaggctacaccaagttacaggcattattgcgcgaacttcagaaggcgaaacagcatatccacatggaatattatatctttgaggatgacgccattggtcgtctggtgagggatgtattgatagaaaaggcctcgcaaggagttgaagttagggtaatctatgacgatgtggggtgctggcacgtacccaatcgttttttcgaggaaatgcgtaatgcaggcattgaggtgagaagcttcctgaaagtgcgtttccctttgtttaccagccgggtaaattataggaatcatagaaaaattgtagtgattgacgggcgtgtgggctttgttggcggaatgaatcttgccgaacgctatatgcgtggcttttcttggggaatatggcgtgatacgcatattatgctcgaaggcaaagcggtgcatggtctacagacggctttcctgctcgactggtattttgtggaccgtacgttgattacagcttcccgttacttcccgaaaatagattcttgcggaacttctcttgtgcagatagtcacaagtgaacctatcggtccatggaaggagattatgcagggattgaccgtggcaattaccggtgcgaaaaagtacttctatatgcagaccccttatttcttgccgacggaacaaatattggcagctatgcaaactgcagctttatcaggagtggatgtgcgtcttatgttgccggaacgtgctgataactggattacacatcttgggtcgcgttcctatctgcgggatgtgatgcaggcgggcgttaaggttttcttttataaaaagggattcctgcattctaaattaatggtttcggatgatatgctttctacggttggttccactaacgtggacttccgcagctttgagcataattttgaggtgaatgctttcatgtatgatgtggagacagcgcttgagatgaaagaaatattccttcaggatcagcgcgaaagcacgcagatattcttgaaaaactgggtaaggcgttcatggaggcagaaggcagcggagtctgttgttcgtctgttggctccgctactttaaatgttattctgtggtgaaatcttatctgaagagagagaagttaacacttccgtaaactcttctttcaatgaagtgagggttctcttcaaaattattatcttttccatgttccagtacaaataatccgtcttctttgagaaggttattcttgaagattaactccggtatggtttccagttcttttagggcgtaaggaggatcagcaaagataaagtcaaactgttcgcgactgttattgataaacttgaatacatctccccgtatcggcagacatttgtcagtctgcacttccttcataatcttgcagatgaatgaatagtgagccggctccttctcaacactgataacgcggtcgcagcctctggataccagttcgatactgatactgcctgttccggcaaacaaatcgagtgcagtgactccttcctcgaaatcaatataattgttgagtacattaaacagattctctttggcaaaatctgtcgtaggacgtgctttaaaggttcggggcacatcaaatcttcttcgtttataaataccgctgattactcgcatgttaataaggcttgcatgtcaatattagttgcaggattcatgatgaatacctgtaagatgaattttctaagttcgttcatcagaatttctttgtcgggaagggtgccggtgagatgaagctcatcccgttcctggttgaattctaattgtttccacgcatacagcaaatagtaaatacgatcttctgtatgggagcactcgaaagaattagcaagcaggagatgtccccgttcgaaacaatagatgtcgataccttcctcacgtacggaaacatacattttcttgctattgcccagtctgctttttacggagaaatattcaatgagcggagtcgattgagaataaaaacgagcttcggggtattgttcggttagaaaagagtatgcgcttctgtctataccgaagacaataactacattattttttttcagaatattgtaaatgaccgtttcattttcccgcttctgatggttgtgatagaataaaaggtcggcctgctcttcttcaaacaaatccaatggcactatcgtaaaacgcttgctagccagcatgatgtttacccgtttgtaagaatgacctaagaagtccgattcgtgaaacacagccttgagattggctgtaagagataaagacgtatcaatctccttttctatcactgagaaagagtcgtcatgaatcgggttatagatagaaaaagaaaatccatccgtactaagacggatggataaagtatattgttttgatttagtaaaatcaatcattattcccagttaccagcaccattgtttggagtgtcgatagaacctaccatcaaaccactgtatttacctaatttggaatctaagtctttcaggttgataatttcctgtttgtcgagtccgctcaaataagtatcgtatggagcttttacttcgaacaagtatacaggagcaccggatttagcggtatcgtttctaacattcatttcgaattgagcgccatttccatgagggataaatttcatagaatccggattgaatcctttcggatagatagtatccaatacagctacccacatagtgtcacgtttgaagttttcaagtccccatttcttaacttcgtcatatctgccggtcttcttagctttttcgatgatcgacattgctttcttttcagttaatccgtcttccaactgcttgtctgtcaattgtccgattttcataacgaacggcaacttctgattcttaacgaagtcaatcaatgtgtccaatttaggagcatacattccgtggtgaagcatacggtattcctgctgtgctttacggatgtcaattagacgggcaatgactgctttttctctgtctttttttgcgttttcaaaattgataggacccatgatgctgttgtagcagatgtaaatcagtgcagcagcacagagcactaatacaatattaaatactgttttcatgataaattatgtttttagttgttatattcgcatcgcaaaaatagaataaattaatttaaatacgatagttccaggaacttttttctcgtacaaaaatgataaataactatttagaaaggcaaattaaggaaaattttccttatgaaccaactttagagcaggaaattgctgtaaaatctctttcagagtttcttctgtctaccttggcggatgaagttttcatcctcagaggctatgccggtactggtaaaacatctctagtaggggcattggtgaaaacgatgaaccagttgcagcaaaagtctgttttactggctccaacgggacgtgcggcaaaagttttttcggcctatgcgggacattctgcctttactatccataagaaaatatatagacaacagtctttttctaatgaaatcagtaatttttcgattaatgacaatcttgctacaaatactttgtttattgttgatgaggcttcgatgatttctaatgaagggttgtcgggcagtgtattcggtacgggacgtttgttggatgacttggtgcagttcgtgtattcgggacaaggttgccgtcttttgttaatgggagatacggcacagcttccgccggtgggagaggagttaagtcccgcgttgtttgccgatgcattgaaaggatatggacttgaagttcgtgaggtcgatttgactcaagtagttcgtcaggtgcaacaatccggcatcttgtggaatgcgactcaattgcggcaattgatagcagcagatgaatgctattcgttaccaaagataaaagtgaccggctttccggatatacaagtcgttccgggagtagaattgatagaaaagctgaccgattgttatgaccatgacggaatggatgagacgattgtgatttgtcgctctaataaacgcgcgaacttatataataatggaatacgtgcgcagatactttggcgggaagatgaattgaattccggagatatgttaatggtagccaagaataattattattggacggagaaatataaagaaatggatttcatagccaacggagagattgcaattgttcgccgtgtccgtcgtacccgtgaaatgtacggcttccgttttgcggaagtcactctcagatttcccgatcagaatgattttgaattggatgctaatttgttgttggatactctacattcagattcgcctgcattaccgaaagcggataatgaccggttattttacacagtgctggaagattatatcgatattcccaataaacgtgaccggatgaaaaagatgaaagctgacccacattataatgcgttacaagtgaagtatgcgtatgcggtcacttgtcataaggcacaaggtggccagtggcagaatgtgttcctggatcagggatatatgacggatgaatacttgactcccgattactttcgttggttgtatacggcgtttactcgtgcgacgaagacgttgtatttggtgaattatccgaaagaacaagtggagtgatttagttgaaaaaaacagtagattaaaggagaagttcccaatctactgtttttctgattctatctaagaagacaagttcctgtcattagattttttcaggctttggcacaaagagttttagcactttgttagtgactgattatcggaagttgtttggctgtacacgttgaccattgtcattatttgtatctgccacatcccaccagattttcgttccttggttgtcgcccatcggccggttggggttaaaggattcactttgcgggtatttgatccgtttgatgaacttaccttcaggcacgtcaccgtccgagttgttttcttcgatattcagcaattcaggataatctgtacggcggaattctgcccaaccttcattgccgttcgggaagatcgaaatccatttttgggtgatgatctctttcaaggctttctccttgtcacttccggatacatcttgtttgttcttcaatccgtcaatataggcttgttttttagcctcatcaatattatagtaatccatggacgctctaattccgtcaatataatattgctcaactgagcctgtcgtccaatttctgagagcagcttctgccaacatgaaccgactctccgcatagctcatccaaaccagttcgcgagcttcgctaaaccaatagttatcatctaaattattatgatccgaacttatcagtttattacatcttacaggagagtaactttttgtcgcgtcctctccttgtacatccatattaccaatcggacatccggcaaagtccttattgctttctttggcttccttaagatctgaaaatggacttgggcgccaccacagtatttcgcatcggggatctaatacttcagattcatttttataggccttttccaaatctttcgacataaccatttgcgctccccaaccgaatatcagcgcatggatattttcagatccgccgcctccttcaccacctttgtcgataggggcaactttcggtacagttctcatgttgtctgcattgctttgcatcaaaccataagtactctcgattgcttttttcccttcttcttgggcacgatccggatcgacatttgaaatacgaagcgccagacgcaaacgtaaagtattggcaaagcgtaaccatttgttgatgtcgcctccatagcaacggtcattacttccttttccttctccccagttcaaacctttgtcgggtttgatgttggtgatagcttcatccagcagtttgaacatagcatcgtacacatccttttggctggtatatgaaatatactgtgtcgggggtaacattccttttatgtagtacgacaatggaatatcaccgtatgtatctgtctgcatagaaatgaggaatgcataataaatacgggttacgtagaactcgttccagtatttgtctttattgacgaaatgacagactttgataatttgtgcatattcgtttgcagtacggtcattatagaaatgatcccatctgtttttggaccagtcgtcagtatatacgtatgtgcaggctttttcatggaaaccggcagatgtatttgccatatagccggcataaatgtcatgagttaagttggtggttacctgataatcattgtaaggcccctcattcgttagattacggaacaaactaccaattgaagtttctgcttcttttaatgcttttatatcagcttcaggcagttcataatcaatatcaatgccttcaggacttacatcggtattagaagtacccggtgaataaggaggttcgtacgggttggtgttcatttcatcaaaatctgagcaagctgctagagcaagtagagatgcgaatgcaagtgttttataatagaatttcataacttctttttatgtttagattagaaaccaagattaatagaaagaccgaatgtacgtgtgtaaggaacagacatataatcgatagcttgagagaacatacttgtgtcataacctccttcgggacttgttcccggtgtatgtttcatcaggtaagccaagttacgggcaacgaatgctacgttcagtgaagttaaaggagtcttcttcagtatggatttcgggaaagaataacctaatgacaattctttcaatttgatgaatgaagcatcgtatacgaattcttcggccataccactcattgatgtgtaatacctttgagcgttcatagctgttgagtttacagtaccgtcggcggtcacacccggagcaacgattttccagccattctctgcattaccacgattagcggtgcgtgctgccaatcctgtgctggttgccattgcctcggatacagaaacaatgtcaccaccaaatttcatatcgaacaatgcagaaagagtaaatcctttgtaggtgaatgatggagaaacggacattaataagtccggttcaatattaccgatcggatgatccaatgtgtattggaaagcgtcttcaccggagaccttggtcggacggccttgtttattaactatcatattaccgttttcatcacgcttgtacaggtttttggcataaatttcacccaagcggtgtcctacgcgtgtaccgacattgattgggaaatttgcatctccattgaagaagagataatcaacgccatctgccagttcttttactttagatacattcctggataagttgatattcaaatcgaacgtgaaatctttcgtttgtacaggagtagaatatagcatgaattcgaatccttggttgacaattaaaccggagttaatcattttaccaccactccaaggagccggtgcagggactttcatgatctggttcttggtacggctgttgtaataagtgaagtcgaatcccagacgattattgaggaatttcatatccaaaccggcttcatacgaggaggaaatctccggcttcaactggtcattctttttaatatcagattttgtgatattgagcactccgttgctgaatgcatagctcaatgtattatacaggttgtatggttctgtatctttacctacttgtgcggcagataggcgaactttggcaaatgtgagccatgaaggtaatgtcttgtctaatgaacgaagaaaatctgttatgatgaaacttaagtttgcagatggatagaagaatgaacggttgctggagggtaatgtggacgaccagtcgttacgtgcagtcaagtccattgacaaatactctttccatgcaagttgtgcagatgcaaatacagagttggtagcgcgttcgtgtccatcttcagcagcactgttcagaatgtttgcggcattgaatatccattggttcttgtttaccatgtcttttgtttcagccgacaaggtctcaaatttctgatacatgaagttggcacctactgtgtagccgatacggaaattttctccgatacggttgtctccggcaaggataaattctgcatttgactcaaagaagttttcctcactgcggctcatacggtcatcggtaatgttttcgatagttttaccgataccgttcgataagtcggtgctttgaacacgtgtacggtaatagtcgaatgcatatttggcgctaaagtgtaaccagtcggtaaagttgatttttgcgttgtagtatccgaaagctctccaacgttcgtcagaattatggcgctggtcttgtacgtaatatggattttccaatccggggttcgggcctgcccaattcacgtgtgcggagttttctgttgaataattctttaaatcatccaaagacacgttgtgcggaataccgattaactgtgcaataactccataacttccgaaatagggacgatcttctgccttggttcgtgataaggagacttttccttccatagagagatattggttcatttctgcaccggcgttcaggtcaatatttatcttatccaatttctcgttcgggaataaacctttattgttagaactgccgaaagatgcacggaaatgagacttgtcggttacattactgatagacacattatggttgtgggcaaaaccggtgttgaaataatctttcagtttgtttccatacttagaataagcacgttgttctccgttccaggcttctaccatgtgtccatccaattcgctaccccaactactgctcgcagccttattgtaaacaccgtctgttccttgaccgtagcgttcctgcattttcagtgtttcagctactgtgctccatgtgaagttcccgctataacgaacaccgaatccttctttttttgaaccttttttggttgttatcaggatgacaccattaccggcacgtgaaccgtagagagcggcagcattcggacctttcagtacagaaatggtttcgatgtcatcgggattaatgtcgacagaggcaccgccacggtctacaccgccatagtaagaagcgtcagaactgttgttgtcgctgaaaggcacaccatcgataatccataaaggttggttattgtctgataaggaggaattaccacgaatcgtaatcttggtggaacctcccaaacctgtacctgccgtattcatctgaagacctgccacttttccttgcaaagcgcttgtcacagaaggatctccggtcttgttcagctggtcgctttttatttcctgaactgcatatcccagcattttcttttcgcgtttgatacctaatgcggtaacgacgacttcatcgataacttgagtatcgtccgacatcgtgacattgagagtcggtttgttgcccggaatctctaatgtcttatatcctatataggaaaataccaatacaggctgttcaccgctgaccttgagggtataattgccatccatgtctgtaatggtaccattacttgttcctttttgcaggatactgacaccaatcagcatttctcctttagtatcgatgacttgtccggtaatcgtgtgttcctggccaacttgttgttggttggtttgttgcgcatttttttctgacaggtatacaatattgtcttctaccttgtacgaaatgcttgttccgctcagaagagagttgaggacttgttctaaagaagcgtcttttacattcactgcctctacttgggtggcagataacttgtcgttataaaagaattgatacttagactgggactgtatctgtttaataacagttcctaagtttgtgcgtgtagttgataatgtcaactgtgcggtagcccattgtaatgggattgccatgaaaattaaaaccaataaagctcgaagtaagttcgacttttgaatagaatgattgctttccatacatttaatttaatggttgtataaaaattattgaactaataaaagaagtcttattttcttcttttataaataaaacaatgctaacgcaataaacacttagtctaatttatctttttttctttatataattaagagtattatgatttcgtgtgtaaatccctttgtactatcattgcagtgcttctcatttaagagttgtgacatgggcttggcacagttgtgccaccacggtgtcattgttgtgacaagcccgtggcacagttgtgccaatgctgtgttgcagttatgtcaattgggagaccggattaccagtcatagtcttcaacgtatgcatcaaattcttgtgtggtggtaactccgcagtttctgaggatattcagtatatgctgttgttcggaaggagagagtaaacgttcgcctttacgggcacgatagtaggttctgcgtcctaaataattcattaggtgcaggataacggtttgcatttgtttataaggtagattctctaagattccgatgaatccttgggcgtatcgtacttttgtactggaacggtaatggggacagccgcctttcacggtagacagatatttgggactgatgataatccagtgttctatgttttccggtacgctttgttctgtaagttgtcttaggcaggtacctgcttgggggcattgtcggttaaggcacatcgaatattgataagggacttttgcaaagtcaattttttcttccatgatttgtagatgtttgttgagcaaaagtagtgaaaacttattgaaaaatagcctgaaagcaaagaagtttactttcaggctactacttttagtcgaaatctcaatgaatagccgctttcagaagtgaactgaaggacagcaattgaaatagcggcacactattgaataaaggattattgctctttagagaaagaataaggcatatcttcttctttcgtacctctgttcatattcggttgattactcatatctactttgatgataccacctttgaataattcttcgtggcgaagataatttttagtatagtcagtgccgtttacgttcatcgaattgacatagaagttctttttactgttgtttggggcatcaatcaccaaactgttgccattctcaaaatgaagtgtggctttcttgaataaaggagcgcctacgatatattcatccgttcccggacaaacaggatagaaacctaatgcagagaatacataccaggcggaagtttgtccgttgtcttcgtcgccgcaataaccgtcaggccccggagtgtacattctgtccatgacttggcgcaaccagtactgggctttccagggctggcccgcataatcatataaataaatcatgtgctggataggctgattgccgtgtgcataattacccatattcataacggtcatttcgcgaatttcatgaatcacctgtccatagtaactgtcatcgaatacgggaggtacggcaaaaacggagtccatcatagtgacgaacatctcttttccgcccattaagtcgattagcccttgcggatcatggaacacagaccaggtgtagtgccagctatttccttctgtaaaggcatcgccccatttcaatggagagaatggtgactggaatgtaccgtcttcattgcgtccgcgcattaatttagactccttgtcgaagagatttttgtaattcatggcacgctttgcaaaaagattgatctcttttttcgggcgtttcagttcttttgccagtttgtagatacaccagtcgtcgtatgcatattccagtgtacgtgctgcattctcgttgattttcacatcgtatggtacatatcccagcttgttataatattcatgtcccaagcgtcctgttgaagatacttcaggatgtacattctctgttccatgcagcaatccttcatacagcgtttttatatcgtccactttcacgcctttcatgtaagcatctaccagaacagaagcagaattattacctaccatacatcctctgtgtcccggacttgcccattcggggaagaacccgctttctttatatgtattgataagcccttcctgcatctccttgttaaccgaaggatacatcagattcagtaacgggaacagacatcggaacgtatcccaaaaacctgtgtcggtatacatatatcccggcaatacttgtccgttatatggactgtaatgaatcggccggccgttcgcgtccagttcgtagaacttgcgcgggaacaggagtgaacggtataaacaggaatagaatgtacgatattgatccagattgccgccttccacttcaatttttcctaatacctggttccatgcttcttttcctttcttggctacttgctcgatattatccttgcccagttctttcatgttgacagccgcctgttcgaagctgataaaagaagaagcaatccttgcgtgcacctgttcgcccttatgtgtccggaaaccgataatagctccggcatggtcagttgtttgttcggtaacgttttcttgaagattgctattggctactgttgctttgtatgtgaaaggcttgtcgaactcgatgataaagtaattcttgaagttttcgggaactcctccgctattgcgggtggtatagccgataatcttgttttcctccggaatcactttgacatacgagcctttgtcgaaagcgtccactatgatataagaatgttcattttccgggaaagtgaagcggaaaaggacagcgcgttccgtcggggccatttccgtcacgacgtcatgttcggcgagatatactttataataataaggagtggcgatctcccctttgtgggcaaaccagcttgcgcgcttttcttcgttaaactccggtttgcctactacgggcatgatagagaactgtccgtagtcgttaatccacggactgggttgatgcgtctgcttgaaaccgcgaatcttgttagcggtataagtgtattgccagccgtcacccatttttcctgtctgcggggtccagaagttcatcccccagggacgggcaatggccggataagtattacctgttgataattcgaaagtagactgggaacccattagcgggttgacatactgtgtccagtctttggctttggcaaagaatgtgcaagcaagtacacaaattattattaatagtcttttcatggcgtatatgttttaatagtaagcaatcaaacgtattatctcactccccatttcgtgggttgggcggtcattttgatttccattgttcctccgtttgcaatatcctgatgatggaagaatggggtattcaacggttggccgttcagtgttacgctttcaatatatttgttcttcttttcgttgttttttactacgatactgaatgtcttttcttcgggcagattaataactgccttgtcgaaggcgggacgtccgatagaatatatcggtttgccgggacatacctgatagaatcccatagaattgagtatataccaggcagacatttgtccgcagtcttcattacctgacagtccgtctgtactgttggcatattggctttgataaacactgtctaccagttcctgtgttctccacgggcggttgacgtagttgtataggtgaatgacgtgatgactcggttcattgccgtgcgcatattgtccgataaggccgctgatgtctgacgaaatcatttctccttcgagtgatgaatctaccgtaaacagtgagtcgagtttttgtacaaaagcgtcttcacctcccattagattaaccaatccatctacatcgtgaggtacaaaccaagtccattgccaagctgttccttcgcaataatcatcgctgcggtgagtagaggcacgtgggttgaacggggtacgccattcaccttttgaatccagtccgcgcatgaagcgggtagatttgtcgaaataaaactcgtaggctttggcaaaacgttcgtatttggcttttgtttcaaagtcgctcattgcttcagcgaagatagaaatacaccagtcgtcgtatgcatattccaacgctttggctaccgattcattttcacggtcgcaaggaatgtagccgattgcgttcttgtaatatttggctttcggcataaggtggggtaacaccagggccgggcatttaataccggtagtgtcatattccgcagcgcgcagagatgctttgtatgcttctttggcatcaaaattacggtaacctttcatatatgcatccacgatgaccggaacggcatgataaccaatcatagtaccggtatagttggagcccagatcccacatcgggtatattccgccttcctgatgttttttgatgagcgaattgataaactgattgttcagatccgggtcgataattgtcattaacggatgtagtgcacggaaggtgtcccataaagagaatacagtatacaggggattgattgtatctccctgatgtacttcgagatccattcccaggtaacgtccatctgcgtccgtgaacaggttcggactgatagccgtatgatatagagcggtgtagaagatcgttttgtcgtccttgtcgggagtcgtaatatctatctttgacagatactgattccaagcggagcgtgcattcttgcgcactttatcgaaatcccagccgggtatctccgattctacattcttgcgtgcaccggctatgtcgacggcagatacacctactttaaccagtacttgttcatctttggtggtattaaagtgtaataaaactttgcagacaggaagccgcttgccgttatccatagtgatagaatcggtcaccaacgtataagagaacggcttggagaacttggcatagaaattaatatattggtcgaaagcccaataagttgttttcttgtgtccgcagatttccgtgtcgctgataacctcgatccccatgtcggaattagtctgccgttgcaggctgtaatccaagtcaagaataaatccggcttcggaactttcggggaaggtgtagcgatggatagcgccacgtttggtagccgatatctcggcttttacctgataagtgtccagaaaaacggaataatatcccggttctgccgtttcattctcgtgcgagaaggcggaggaatacgctaattgctgactttgcggatcagtggtctgatatcgctgttcgccgacagtcggcatgagtagtacgtcgccgtagtcacaacatcctgtgccactgacgtgcgtgtgtgagaatccgttaatggtagagtcttcataataatagcctgaacaggcgtcccagccatcaatccgggtatccgggcttggctggatcattccgtgcggaactactgctccgggaaacgtatgcccgtgtccgccggtaccgataaagggattgacaaaaacgctataatctttctcattagtgggagctgtacaggagttgagtgcgaagaatcctcctaaacatcctactatcaggaatgtttttagtttcatggtagtaatagcttttagttttgccgaaagcaatccctttatttcggggaaataaagatattgcttcctacaattttataatcaataggtatagagttttgtaatgacgttagcacagaatcgatcgtcgactttcttctcagtacaccggagtaagtcttatccgcccggatgtccggtgacaggataatcttcacgtcataaaaacgttccagtgctttcgtaatagtaaagatatcggccttttggaatggaatcaggttgtcgtgccatacggcgtccaacttagcatccacctgtttcacagtcaaccgtccgctttttttgtttaactcggcacgttggccgggggcgagaataatctgcccttcctccttattgcctttcacttcaatttcaccttcaatcagtgttgcttccgctacccggcaattcttatcggatttaaagttgaatgtggttcccaatacacgtacacgcatagcgtcgctttgtacggtaaatggtttatgacggttctttgttacctcaaaataggcttctccttccagatagacattacgttctttttcagaaaactcgcgtggatactttaaggtcgcaaggttgttcagccagactctggtaccgtccggtagaaccacttcctttacgataccttcgttggcaacggcgaccattaattgctggtctgccccgttatgatagaaccagtacccggctccgcctcccataagaagaatgacggcaataacggcagcatatctcatccaacgatgcatacgcagcagtttggcctgtttcccttttgcttcatccaactttttgtataacagcttttcagcatgagctatccgttgttcgtcggcatatcggtcgaatttacccaaatgataaatttcttccatgcgaaagagttgacgggcattttcttccgattctttcatccaagcatttacttcgatgatttcttcttccgagcattgcccagtcaaatatttattcattatgtcttcacttagatttctcattttcttttccttcatataaataatacaattcagaacctaaaaacacttagcttacttgcacaaaaataagactataatgatccaaagaggatctagacgactgcgtaagtacttcagtgccttatacatatgtgcttctaccgtgcgtagtgaaaccccgaggacatcggctatctctttgtttttcatatcatgcagatagctgagtttgaaaacttctttgcacttgtccggaagttcgttgattgcatcgtagatttctttccgtagttcccggtcttcaatcctccggatcacttcgttgttgtccggttgatagaattcggcacgcctttggttgatttcttccatggcggcgcagtagccgtcttccacacgatgtttcaggacgttgagagcacgggtgtaaacggcacgatagagaaaggcttggatctgatctcctatctctatggtgtctttccgcttccataattctacaaatacatcctgcactacgtcctccgcttcttcctcacctaccagacgggtggcgtagaaaatcaggttgggatagtatctgcggaacagtgctttataagtaatatcgaagttttcgttcatgctctcggtcagttaagtttggttttatttatggattcttttcttcgaatatgacgcctattgctttaggggtgttactcatttcgaattccacagtagctccgctcatgatctgttcatgggtgagataagtcttatcgtaaggttggccgtccactttgattgactggatatagatattttctttgtttacgttcggagcgaatactgtaaaagtcttgccattggcgagatgcagcttgatttccggaaataggggagtgcctatttcatatcttccgctgaccggatttacaggatagaatcccatagcactgaatacgtaccatgccgacatctgtccgcagtcttcgttgccgcaaaggccggccggttcgttcttgtagagctcattcattacttttgccacgtaatattgagtccggtcattgaatcctatcgaattgaacaggtagataacgtggtggctcggttcgttgccgtgcgcgtattgaccgatcattcctgtgctgaaaagtgggagctcgtcatcttcggacggatgataggtaaacatactatccagcttttccgcaaaccggtttttgcctcctacgagattgaccagtccgtcaacatcatgctgtacagaccagaaatattgccatccgttgctttcgcaaatatgcggagtatagtcgtctgctttgaaatctttgataaagacgccttcgtcatcacgcggttgcatgaatgaagtggccgggttatagacattcttgtagttttgcgaacgtttatagaattcgtctgcaatatctttcttgcccattttctgtgccatttcggcgatgcagtagtcatcgaaagcatattccagtgttttggataacgaccagttttctgcgttatagctatccgtcacgttataaggtatatatcctaattttttgtagagcccgatgccccggtaattgtccaggttggcagttgctacgcaggcagccagtgccctttccgcatcaaagtctccgattcctttcagataagcgtctgcaatcaccggaacagcgtggtaaccgatcatcatgtccgtttcgctgccgtagaagttccataccggcagacgtccgttctgttcgtagaaagcgatgaaggatttcaccatatcgttgacacgctccggttcggtgtaggtaaaaagcgggtgagcggcacggtacgtgtcccataaggagaaagtgctgtaatttacccaaccgtcggcttggtgtactttcttgtcgggaccgtaataagctccatccacatcactataaattgtcggggcgatcattgaatgatagatagctgtgtagaagttcactttatcatcttcgttgtcactttttacttcaatctttccgagttggcggttccagttagctttggttgcagccagatatttgtcgaagttgttttcggggacttcagcttgcaggttcttggcagctccttccatgctgacgccggaaatggctgtgctgacaagtatctgctcgccttcttgagtgttgaagtcgaagcgtgcgatagtagctgtgccgatacgtttgttctctttgacgatagccattgtatccagttctattttctcgaaaggcttggagaagcgggtacggaagtagatgtgctgatctcgtgcccagccgtcagagaaacggtaaccttggatagtgacggagtctatcacctcaatgtgagagtcgttggtaaagtcccaattcatcgctttcttcaagttcaggaagatagcggattgagcttcgggaaaggtataccgttggataccgcagcgttcggttgccgtcaattcgacgttgatattataatcggtcaggcgtacctgataatagcctgcataggcgctttcgtcatcgtgggagaacttggagtgaatgcccagtggagcttttgcttctttgtaaggcagcgtgacaggcataaaagagatatcatacagatctccagctccggtaccggagaggtgcgtgtggctgaatccggcaatcgtgctgtccgggtaaaaatatccggagatgcggtcccagccggggagtccgttatccggactaagttgtaccattccaaatggcgcttgtgcgcccggataagtgtttccggtgaagtctgttcctataaatggatttacataagatgtgtaatctatttcatgtttctcttgtgtaggggtacaagaaatcagcatgcagattaacagcaggcatagacaagtgggtgttctcatcgttctttgggtattagtgattatttattttatttatttgaaggataagaaaaataattaatctgcgtgcaaaggtagaaaaaaaactgtgacaaccctatattatatacgcaatatttttaaagtgaggaagatagactttataattgtgtttgtgcttcccgatatcggagatgtccctcactggtgtcggagaccgattccttggtatcttgattcaaaccttctctgcgtccggatttggatataaaaaatagagtgtgtctcacagtaattcctaccttaagacacactctatttattttatttatttacttactcttagattcctgcaagttcgagtactttttcaactgctgtcggtaacccgtcagcgtttttgcctccggctgttgcaaagtgaggctggccgccgccgccaccttgaatcagtttggcagcttctttcaccagattacctgctttcagaccaccggctacgaggttatcgctaatcataactgtcaacatcggtttgcctgcatccgtacttccggctacgaagaataagttttctgtaatttcgccacgaagctggaaagcaatattcttcaccacttctgcgggtagaggagcacagaacttgattactttgatgccatgaatttcctgtatattcttcaacagtctttctttcaaggccgcttctttttctttcatgaaatcttccacttgtttcttcaaaccggcattctcttcaatatatttgcggatagcaattcccaagtcaggagtgttgttgaagagtgccttcagatcgctgagcgtatcctggatagtatccaacatttcttctacacgtgcacctgtgtaagcttcgatacgacggacaccggcagcaacggaactttctgagacaatcttcaccatgccgatgtttcctgttgcggctacgtgtgtacctccacaaaactcaatagaagaaccgaattgaatcacacgtactctgtcaccgtatttttcgccgaaaagagcgatagcacccagctcttttgcttcttcgataggaatgttacgatattccttcaaaggaatattggcacggattcttgcattaacgatgtgttccacctggcggatttcttcgtctgtcaccttctggaagtgagagaagtcgaaacgcagtgagtccggagtgaccaatgaacccttttgttcgatgtgttcgcccaatacttcgcggagagcagcgtccagcaagtgagtggccgagtggttggctgcacaggcagcgcgtttgtcggtatttacacaagccatgaacggagcttccgggtgttccggtaactttttggtaatatgtatcggaagattgttttctttcttggtgtcgattacttcaatcgtttcaaattcgctgaccaatacacccgtgtcacctacctggccaccactttctgcatagaacggagtgtagtccaatacgatttgatacaaagtctggttcttttgtttgatctggcgataacggaggatagaggcttcatattcggtataatcgtaacctacaaattccgttgttccttctttcagtgtaatccagtcgcctgtctcgatagcggcagcgttacgtgcacgctgtttctgctgttgcatttccgcgttgaattcttcgaggtttacagtcattccgttttcgcggagaatcagctctgtcaggtcgagcgggaaaccgaatgtatcatataaggtgaaggcatctttgccgctgatttctatttttccggcagccttggtatcttccattgtcttgtccaacagacggattccggtttccagtgtgcggaggaatgcttcttcttcttctttgataactttctcgatcagggttttctgtgctatcaattcaggataagcgtctcccatgttatcaatcaataccggaagcaacttgtacatgaatgcttgtttttgtccgaggaaagtatatccgtaacgaacagcacggcggaggatacggcgaattacataacccgcttttgcgttagagggcaattgaccgtctgtgatagagaaagcgatggtgcggatatggtcggcgatcacgcgcatagcgatgtcctgctgtttgtcttttccgtattctgtgcctgacatgacagcaatcgctttcagcatcggttggaatacgtccgtatcatagttggacgttttgccttgcagtgccatacagagacgctcaaatcccataccggtgtcaattacttttgccggaagcggttcgaggctactgtctgctttgcggttatattgcataaatacaaggttccagatttcaattacctgcgggtgatcgtggttgactagatcacgaccggagatttttgcacgttcttcagcaggacggaggtcgatatgaatttcggaacagggtccgcaaggtcctgtatcacccatttcccagaagttatcgtgtttgttgccattgatgatatgatctttcggtaggaattgctcccagtaagaagcggcttcgtcgtcacggctcagtccttcttcggggcttccttcaaatacagtggcatagagatgttccggattcagtttcagtacttctaccaggtattcccatgcccagttgattgcttcttttttgaagtaatcaccgaaggaccagttgccgagcatttcaaacatggtgtggtggtacgtatcgtgtccgacttcttccaggtcattgtgctttccgcttacgcgcagacatttctgagagtccgcgactctttggtatttcgccgggtggttacccaaaataatatctttaaactggttcatacccgcgttggtaaacatcagggtagggtcgtcttttatcaccatgggagccgacggaacgatgtggtgtcctttcgactcaaagaaattcttgaatgaatctctgatttcttttgcagtcaacatatcttctatatatctatcgttgaggttaatattctcaaaaaactgtgcaaagatagcttgtttttattacttttgccgtattaacaagcgaaatatttccaaaaagatgcgcaaagtatactatatctataatccacagacccagacttatgaccgaatttatcctactgtacggcagcgtgcgctcagtatcctgcgcagactcttttacggtatggggctgggagcaggctgtttcatcgtgttgctctttatcttcggttcaccgtcagaaaaggaattgcgaatagaaaacagtcgtttacaggcgcaatataatgtactttcccgccgtttggatgacgccatgggggtacttcaggatattcagcagcgtgatgataacttgtaccgcgtgattctgcaagctgacccggtttctccggctattcgtcaggcaggatacggaggtacgaaccgttatgaagaacttatggacttggccaatgccaagcttgtcgtaaataccactcaaaagttggatgtattgtccaaacgactgtatattcaatccaaatcttttgatgatgtggtggatatgtgcaagaaccatgacgagatgttgaaatgtattccggccattcagcctatttccaataaagaccttcgtcagaccgcttccggttatggaacgcgtatcgatccgatttatggaacgacgaagtttcattccggtatggacttttcggctcatccggggacagatgtatatgctaccggagatggaactgtcgtgaaagtgggatgggaaaccggatacggtaatacgattgagatagatcatggctttggatatatgacgcgctatgctcacttgcaaggtttcaatacgaaagtgggtaagagggttgtacgtggtgaagttatcggaaaggtggggagtacgggaaagagtaccggaccgcatcttcattatgaagtgcacgtgaaaggtcaggtggtgaatcctgtaaactattatttcatggatctgagtgcagaagattatgagaagatgatacagttagctgccaaccatggtaaggtgttcgattaaattttaaagaaacaaaagaatgctatgctcaatacggataaggaattaaagctgtattattcaataggtgaagtggccgatatgtttggtgtcaatcagtctttgctccgtttctgggaaaaggagtttccacagatctctcccaaaacaacgggaagagggatacgccagtatcgcaaagaagatgtggagacgatcggactaatttatcatttggttaaggaaaaaggaatgacccttccgggtgccagacagcggttgaaagataataaagaagctactgtccgcaattatgagattgtgaacagactcaaagcgataaaggatgagttgctggcaatcaaacgggaactcgacgggcgggagtaaattttctcgcccctacttgcaaacattttaattcgatgactattcttctacgcggtttacctgcttgatattctgaatcttcttcaggttgttacagattgtctttacgtcttccacatcatgtacccacaattgtatctttccttcgaagatgccatcgttggtttcgattgtcaatttgcggatgttgacattcagttgccgggagataacttgggttacttcatttaaaagccccatactgtctattccttttatatatatatagacgaggaaggagagttctttgtgggtatcccattcggtagccagaatacggttaccgtaactgcttttcagcttggctgcaaccggacattggcgtttgtggataataatccggtcgttctcatcgacatatcccaaaacatcatcacccggaatgggatgacaacattctgccatgatatacttcttttgaaggctttcttccgtcagtttgagtatttgtttcgggttaattttttctttctcttgaggttgctctttttcttccggcttttctttattggtattgccgaaagagaaagtgaggtatttcttccagttgctggtttgtttttctttcagttcgttcttgtccacttctcccaaaatgataaccttgctgccgatagctgccagcagttcctcttcgtttttggcattatgcaatttacgcaatttttcaatcacggaatcttccggacggatttcctcttttttgagaaattcgctaaggatttcttcaccaagcttttggtttactttgcgttctttgcgcagaatagcggctattttggcacgggcacgggcggttgttgcaaacacctcccattgcggttgtacacgttgcgatttagatgtcagaatctccacctggtcgccactttgtaacttgtgacttagtggtacgagtttatgattgactttggcgccgatacaatggctgccgatatcagtgtgcagtgagaaagcaaagtccagtgctgttgaattttgcggcattgtctttaactcccctttcggtgtaaacacaaatatttcggaagcaaagaggttcagttttattgtatccagaaagtcgatagcgtccggttgcggatcatccagtatttccttgatcgttttcagccatttctctaattcgccttcgtcctcactgccgcctccctctttatatttccagtgagctgcgaagccttgttcggcaacgtcgttcattcgttcgctgcgaatctgaacttcaatccattgcccgttgttccccatcagggtaacgtgcaacgcctgataaccatttgccttcggatgacttacccagtcacggaggcggtcaggatgaggcttgtatattttggagatagagacgtagatatcgaaacagtcgttgagttcctcctctatgttgcgaggctcaaaaataatacggacggccagtaagtcgtagatttcttcgaaaggaacgtgcttggtctgcatcttgttccagattgagtagattgattttacgcgggcgagaatccggtatttcaatcccattttatcgagttgtgtacggataggagctgtgaaatcgttgaataccttgtcgcgttcggctgctgtcgcattcaacttttcttctatctcggcatattcttcgggatgttcgtatttgaaacttagattttcgagttcggtctttattttataaagccccagacggttggcaaggggagcgtagatataaagagtttcgccggctatcttgtattgcttgttgggcaacatggaaccaagggtacgcatattgtgcaggcggtcggctattttgataaggatcacccggatatcgttcgacatggtaagcagtaactttttgaaattctctgcttgtgccgaggcacggtcgccaaagatacctccggatattttagtaagtccatctacaatttgggcaatctttggaccaaagatgttttcgatatcttctaccgtataatcggtgtcttccactacatcatgcagtaacgctgcacaaatagaagtcgatccgagaccgatttcgttgcatacgatactcgccacagcaatcgggtgcataatatatggttcgcccgaacggcgtttgattcctttgtgcgcctgattggcaaagttgaaagccttcgtaatgatttcaacacgtttgcgatgttttgtagcgagataatcattcagcagttcgtggaacgcctgattgatcatctcttcatcagctatttctttgggggtcagattatccataattgttatcctttcacttgcttacttttgcaaaaataagcaaatttccgaacggtgcaagcgggataccgtttatttgtatattttcaatcgttttcctgctgcaatcttggtgtttgacattccgttccatcgctgtatatccttaacactgacaccatattttccggcaatagtcgacagagtgtctccactttttattgtgtagtaagacagttttccttttccagcaacggctgttgtagctttgcgggtactaggtgtattctcttttacggcaacagtttttcggttacggaacaattcattcgagcgatgtgcatagattgtatcttgtttgtcgatgaaattgctgattgcttcgatcggcaaccgcagggtataaggcttgctgtcacccgggataacttgtttcttgtactgtggattcaaactctttatttgatccaatggcacattacaaagatcggcaatctgttcgaaatgcaggttcttgttcacttgcacagtgtctgtgcttgccggaatattagtttccattggacaaatattgtggtcgcagtaataggtcatcacatagttggctgcaataaaggcaggtacataaccacgtgtttctttgggtaataaattgtagattttccagtaatccgtttcaccgttggcgcgacggattgctttgttgattgtgccgggaccacagttgtaggcggcaattacaaggttccagtcgccgtaaatggcgtacatctctttcagataacgtgcggcagcccatgttgctttgatcgggtcacggcgttcatctaccaaactgttggactccagaccgtagattttacctgtgccgatcatgaattgccacaagcctgatgcgccggcacgtgatacggcggaagggttcaaagctgattcaatgataggaagatatttaagttccaatggaagtccgtatgcatccaatgcttcttcgaaaatcggcatatagaagttgcaggcgctcagcataaaagaaacttgattacgtaggcgtcctgcatacatatctatgaatttgcgtacaatgtcgttgtatggcatttccataatagccgggatgcgtgagaggcggtccatgtaaacagaatcactgaataaaggatttacttcagccgtgctgcaatctttgcccagatcaatgtaatttttggctttccaatcgttcagcaaactgtcgagcggataagtcatactcataggcaggtcgatgctttccttacgttctgtaccattttcacgaatcaccacatctacactttgggcttttacttgggatgttgccaatagtaaaagaagaataatcgaacaatagttaactaatttcttcatgcttcaataataagatcaatctaaattgtgtttttaaaatcgtaatacgcattgcaagccgaccgatttgcttttcaaactatttgaacggaactggttgttattgtcgataactgccggttccactttcatacttaggtcgggggttatatcgaagttggacaactcggcatctacataagcgtcaatgatagagatgaggtaaactccgataaatgcaaatatactaaggtcccggtaacgccggaacatatcctttcttcgttttaacgtactttttaattgttcctcgttgtaagaggaattagggggcagcagatcttcataacttttagtgtttggattgctgtccataatgtccagataggcttgcgaatagtctttatacatcttgccattccaactcaaggcatacgcacaaccggcaaatcctccatatataataggcagtttccagtatttacggttgtaaatctgtcctccacccgggaatacgacggcaagccaggtagctttggtcggattaggtacgaatatctttttattaatgtcttgggatggaggcggaaccgtatcggtattcacgacaatggctgccggctgttctatcttcttcagttcttttttgttggctgcatcaaggctgtcggctacttgtattttagctgccgataaactgtcaatagactgaagatgcttaggtggtaacattatgctgtcttttcgcaatgaatcttgctcttgcatagggtcacgatgtcttcgtgcacgggcttttggcggttctcggtgcgtaatggtagtatctttctgaactggagttacaggggcttgtgcatacacatcaatccctgccatctgtaaaaaacagagaagcagggtgctgattagtaactgatatttcttgttttttcttgtcatttatttctttagcgtatcgaagatttccatgatacgttccagttcctcctcattactgaaaggaatactaattttccctttccccttttcggagcaagtgagttgtaccttggtgctgaaaaagcctgaaagttgttgcttcagtaagttaaattcttccggaagtttggcacgtttcggagttattttccgcgtaccgcttttcacagcttcaccttcacttaatgattttacaatctcttcgactttgcggactgaatatccgtgttcttgtatttcttcgaatatttttacttgtagtttagggtcgcctaatgaaatcaacgcacgggcatgtcccatgtctaactgcttgttttgtagcgccatttggataggagcgggtagcttgagcagacgcaagtaattggcgatagtcgtccggttcttgccgatacgctcgctaaggcgttcttgggtcagttcatattggtctagcagatgttgataagccaatgcgatttctacagcattcaggtcttcacgctggatattctcgatcagcgccatttccatcatgttttcgtcgtcggctgtgcggatgtaagcagggattgtttttaatccggctctctgtgaagcacggtagcggcgttcacctgcgataatttggtattcattgtccgataccttacgtaaagtgatcggttggatgatacctatttccgctattgaatcagccagttcctgcaaggccgtttcgtcaaactcacggcgaggctggttagggttgactgaaatcttagctaactctatttcgttaatggaagaagaaccttcggttttcacatcatccattgagagcaaggcgtcaagtccgcgtcctaatgcatttcttctttgtgttgccatatcttcttcgttacttatttattacggttaataatctctttagcaagagccaggtggttcttggcaccggtggagtccgcatcataaagaatagtcgggacaccgtagctgggagcctcgctcagttttacatttcgttgaattacggtgttgaacaccagttcctggaagtggcgttttacttcatcgtagatttggtttgcctggcgcaggcgtgaatcgtacatcgtcagcaggaaaccttcgatttccaatgccggattcaatttcgacttgataatcttgattgtgttcagcagtttgctgatcccttcgagagcaaaatattcggcctgcacggggataatcacagaatcggctgccgtcagggcattgattgtaataagtcctaatgaaggagaacagtctatcaggatatagtcatattctttcttcaaaggagtaagtacttctttcagtatcttttcgcggtttgggaggttcagcatttcaatctctgctcctacaagattgatgtgcgaagagattacttttaaagaatcaatttcggtgtcatggatagcgtcctgtacgttggctctgtcaatgatacattcatagatagtacattccgactgcttgatgtccactcccagaccggaggaggcattagcttgcgggtcggcgtctactacgagtacctttttttcgagtgtagcaagcgaagctgcgagattgatcgtagtcgttgtttttcctacaccacctttttgattagccaaagcaataatttttcccatattctctaaatttattggcagcgaaataagtgataaatccttagagcgcctacgaaaaaagagaaactttgcaatttctgttgataagtcacctgttttgttaataactgtcggacgaaacagataccaaacttcgacaggttcatcatctacctttctctttatgagcttgcaaatatacatatttatattggatatttatttctttttttgctcgcttgcagaagattaagatttgtaaacgggtagaaacagggaaggaagatactttttcatctggaggaaagagggtttggaggtacggcttctttttgttacttttgtgcgaatattaaaaaggaaaggattgaatatatggaaaataagaagccgttgatactcgtttccaatgacgatggggttatggccaagggtattaatgaattagtgagatttcttcgtcctcttggggacattgtggtcatggctcctgactctccgcgttccggtagcggatgtgcgctgacggtgacgcagcctgttcattatcaactggtcaagaaagaagtcggattaacagtctataagtgtacgggaacgcctaccgactgcatcaagctggcgcgcaataccgttctcgaccgagaaccggatcttgtggtcggaggcattaatcatggagataattcggcaactaatatgcattattccggtactatgggagtggtggttgaaggttgtctgaatggtattccttctattggcttttcgctttgtaaccatgaccatgatgcggattttgaagctacgggactctatgtacgcaagatatctgctatgatattggagaaaggacttcctcctttaacttgtttgaatgtgaacttcccgaatactgccgatatcaaaggaataaggatttgtgaacaggcaaagggacgttggaccggggaatggactccttgtccccgtttgaatgatacaaattatttttggttaaccggtgaatttaccgatcatgaaccggaaaatgagaaaaacgatcattgggcgttggttaacggctatgtagctatcaccccgactactgttgacgtgacggcttatggttttatggacgagcttaataagtggttcaattaagaaccttcaactatcatgaagtattatctgattgttggtgaggcttccggtgacttgcacgcttcccacttgatgagtgccttgaaaacggcagatccgcaagccgattttcgctttttcgggggcgacctaatggctgctgttggcggcaaaatggtgaagcattataaagagctggcatatatgggatttattcctgtattgcttcatttgcgcactatctttgcaaatatgaaacgttgcaaagaagacattgttgcttggaatccggatgtcgtaattttggtggattatccggggttcaaccttgatattgccaaatttgttcatgcaaagacacaaataccggtctactattatatatctcctaagatatgggcatggaaggagtatcgcatcaagaatatcaaacgtgatgtagacgaattgttctctatacttccttttgaagttgagttttttgaagggaagcatcagtatcccattcactatgtaggaaaccctaccgtggacgaagtggctgcttatcaggaaatgaacccgaaagactttgctgcgtttattgcagcaaaccagttggagaataaaccggttattgctttgctggcaggtagtcggaagcaagaaatcaaggataatttgcctgatatgctgaaagctgcttctgctttcccggattatcaactggtattagccggtgcgcccggcattaccccggaatattatgaaaagtatgtggggcaggcgaacgtaaaaattatattcggacagacataccgcattttacagcatgcagatgcggctttggtgacatcgggaacggctactctcgaaacagctttgtttcgtgttcctcaggtggtttgctatcatactccgattggaaaagttatttcgttcctacgacgtcacattctgactgtgaaatatatttcattggttaatctgattgccgactgtgaggttgttaaagagttggttgctgataccatgacggtaaagaatatgcagtgtgaactggctaatcttcttgaaaatgaagtgtataagaaggaaatgcttactggatatgattatgtggcggaacggttgggacctgccggtgctccctgtcatgcagctcatggaatagtgaagctgttgaaaaaataactttctttttctgaataaacgtaaagccgatgcagtaattgcacggcttttttatttattaagcagaagactaaaaaagaaaggaacagatatgaaaaaatttaagtggcttttaggtatgttagtactggcactaatgccaatgttgcaatcatgtgatgatgatgatggatattctatcggagatttcagttgggactgggctacggtccggactaccggtggaggaggttattatttggtaggtgaccgttggggaatcatcgatccggttgctacttctataccttggttcaaacctgtggatggtgaacgtgtggtatcctttttcaatcctttggctgacatgagtgatgaaaaaggtgttcaggtgaaaatggaaggtattcaggaagtgttgactaaggaagttgaggaaatgactgctgaaaatgaagaagaatttggaaatgatcctattttgatttatcagggtgatatgtggctgggaggaaagtttctgaacattatcttccgccagaatttgcctcgcagtgaaaaacatcgcatcagtctcgtggagaataagatagcaactgagccgggtgaacccgaaactccggaaactttaagcatcggtgaagacggctatgttcatttggagttacgttataatacgtatgatgatgtaacagactattgggggtggggacgagtttcctataatttggaaaagttctacccgacacccaaagaaggtgaaactacgatgaaaggttttaaggtaacgattaactctgaagaaaatggagaaggagtagtggtagtacttgacttggaacatccggtcggtgtgccggagaaagctaaagatgtacatgctacatctgtaatcagataaataacctaacctatgtaactgtgtgtaaaaaaaggtcgggataattttcgcaaagaaagtttcccaacctttattttttatctctattctgaatatacagatttaaacccaagtgagagcataaagatagactactgctgccggtatagccattaatgaactgtcgaaccgatcaagcatgcctccgtgtcccggaagaattgtaccggaatcttttacgtgaagttggcgttttagcaatgattctgtcaagtcaccccaagttccgaacactacaactaccagcgccaatcctgcccattgccacatcgacatgaacggaaaataatgtgccagtataaaggaagaaccaatagcaacgatacctccgccgatagagccttcccacgatttcttaggagaaatacgttcgaacaaacgatgctttccgatcagcgaaccgatgcaatatgcacctgtgtcactcaaccaaaggaagatgaagatagataacggcaaaatcgggttgtagctaacactgctgtattccgaactgggatcattgtggaaagcaagtacgttcagtagtgcgaatggcagaccgatgtatagctggctaagcatagaatatgcccagttcagcaccggattttcctttttcaggtataactcgctaatcattaagtagagcagtagcagtacgtaaggaataaagatcttggaatcagctgcatcaatacagaagcccattactgcaaggaagagataagctcctcccagcatgataatcgttttatttacgtttactccgtcagcacgcatatttactagttgtccaaactcataaatagtcaaggcgctaatgattatgaacagtataccgaaactgaatgatgtgtaaaggatgcatcccaccagaatggcgacgaaaagcacacctgtaatagcccgtttgataaaattgctagccaaaatatttgcgttttaagttgttttctttccaccttccgccgagatcacctttttttctatggaaactttaccttccacggtaatcttagcttcggttgcctctttctcctctgtagagttttcagcttcttcttccttgatttctttctccttctcttttacctcttcggccagtctcttttccgcttcggcagcttcctgactttctttggcagccatgatttcttctgagcgggaagcccaagggcgttttccaaagatacgttcaacatcttcggcaaagattacttccttatcaattagtaattgagcgagctggttgtgtccttcccgatgttcggacagaattttttttgcacgttcatattgctcattcaccatatttttgacttccgtatcaatcagttcggctgtcttttcactatatggacgattgaaagaatattcttcattgttataatagcataagttaggcagtttgtcgctcatacctaaataagctatcattccgtatgcttgtttggtgactctttccaagtcgttcatagcacctgtggagatacgattgagaaataaatcttcggcagcgcgtcctcctagagtggcacacatttcatcgagcatttgctctttagttgtgatctggcgttcctccggcaaataccaggcagcacccaatgcacgtccgcgaggaacaattgtcactttaatcaacgggtttgcatattccagcagccaggagatcgaagcgtgtcccgcttcatgcagagcgatagaacgtctttctgcttctgttgtaatctttgtcttcttttccaaaccgccgatgatgcggtctacggcgtcgaggaagtcttgttttccaacgaacttcttgccgtgacgggctgcaatcagggccgcttcattacaaacattggcaatgtccgcaccggagaaccccggagtttggcgggcaagaaggtccacatctacagtatcatctatcttgatcgggcgcaaatgcacaccgaatacttctttacgttcattcaggtcgggcaagtctacatgtatctgacggtcaaaacgtccggcacggagtaaagccttgtcgagtacatctacacggttggtcgcggccaggatgattacaccactattggaaccgaaaccgtccatttcagtcaataactggttcaatgtattctcgcgttcgtcatttcctcccattgcaggattcttgccacgggcacgtccaacggcgtcaatctcgtcaataaatacgatacaaggagctttctctttggcttgcttaaacaagtcgcggacacgggaagcacctacgccgacaaacatttccacaaagtcagaacctgccagcgagaagaaaggtacattagcttcaccggccacagctttggcgagtaatgttttaccggtccccggagggcctaccagtaatgctcccttaggaattttacctcccaagtctgtatatttttgaggttctttcaagaactccacaatttcttctacttcctgtttggcttccgccaggccggctacatctttgaatgtaatcttgatcgcccctcctttttcgaaaagttgggcttttgatttacctacattaaacacaccgccaggacctccactaccaccgccactcatacggcgcatgaagaatatccataaagcaatcagcagcacaagcggcaggacctgaatcaggatagcagggaatatatctgatttaggcggataatccgaggtcccgtcaaaatgaccggcttctttttctgcctgcaaaaattcttccagtttgtcagtagacggcgccctacttgtgatgatcgggttgcgccctactttggtagagtccgctccgaatacggcacctacggaattaggtttgagataagcctcaatcgacttgtcctcatatcccagcactttgctgacataaccgtttttaacgtaatcctgaaattcgctgtatgtgacagctttgtttccggctccccttgaatcactgccccaccagaggccgagaagcataagggcaataatcatatacatccagttcaagttgaacttgggcatattaaccttgttgttaggtttattgctattgtttttgttgctactattattgtccataatcgttgattagtctaaatcggggatttgaataagtttggcatctgcccaaaggtgttccagattataaaaggctcttgtttccggtagaaaaacatgtaccagtacgtccgcatagtccatagctacccattctgcatttcgaagtccgtcaacggcaaaaggtttgctgtccgcacctttacgggtaaattctttgatagaatctacgatagcaccaacctgactgggagaatttccctgacaaataacgaagtatttacagatagtatcttctatattggttaaatcggcaataatgatgtttttaccttttttctcttgaattccctcttttattttttcaattaatactttagtatcgttcattcttttaattgagattaataattcatgttctcttttggtttataacaaaaaaggcttcccctttgtttctgattataaacgtgatatttttgacaaatatacgctgatttattggatacaagaaagttatcacttaatttttgtgttttttagtggagatgcttttatttgaaaagttaatttggggatttttgcaaaaaaaatagtggaaatgttttgaattcccaaaatatttgtatctttgcacccgcaaacgaaaataattgggctatggtgtaatggtaacactacagattctggtcctgtcattcctggttcgaatccaggtagcccaacaaaaaacaatggttaattagaataaaccctgctaagaattagttcttgcggggttttatcattttttgcccgcttgaaatttaaagataatgtagactaattcggtgacagtttttgaaggcgtcaaatgctatcatttaataataaagaagaacaggctttattgttcaacgaacataaagcctgttttatattttcagtagcaactttctttacaaaaagattattcttctgcttttatagattcgtctattactttaatcttctgtgatacaagttccaaatctgctttcagcttttctaccttacggttcaactcggttaacaggctgctgcctttctttgaggtggaagtcaggaaacccaggttattttcgtaagtctggagttcattcttcatactctcgtaagtacgtaccagcttttcgcgttctctgtatagagattgtggtccgccaccttgtatattgttgatgtttgaccggaagttacttaacttcttgttcgaagcgctaatgttgaaacggtcgaacaactggtcgatcaatccatgatattgcttgtacaacttatctttttctttgaatggtacatgaccgatagaattccattctttcatcagatcccgtaccagtgtgctggcttcctcgatatccatgttttcgtctatggacgacaacttttcgatcaatgcctttttcttctccatgttttctacttcgatagagcgttgtgaagaagtagccttgtttttctgttcaaagaaatagtcacaagccgtgataaaacgtttccaaacagcgtccgaatgtttcttggctaccggtccgattgtcttccactctttttggagtttcgtcagggtatcggcagttgctttccagtctgtactgtcttttaaggcttccgctttttcgcaaagcgcttttttcttttccaaattctcgttcatgccttcttttaagctcttgaagaattctccttttttcttgaagaagtcgtcgcaggcacggcggaaacgttcgaatatcttcacgttcatcttttggggagcaaaaccgatagttttccatttgttttgcagggcaatgacttcttgtgtcttgttttcccaagctgagaatgttttcagttcatcgaactctatcgcttctacgatttcgcagataacggtcttttggtccagattatgttgttccgcttctttcagcgtttcaaaatgtagctggtgacggcgatttacagccgtagaagctgctttgaaacgattccaaatctcgtcgcgcaactctttcgctaccggacccgtatcacggaattcctgatgcaacttctggagttggtggaaagcagaaaccacatcctcttcatcagccagcttttcggcagcctcgcaaagatgcgtctttatttccagattcttcttgaaatcatattcgcggaattcgttgtttaactttaatagatcgtagaatttctctacgtataattgataattcttccaaagttcgtttactttgccttgcggaaccaacttcgtctcattccattgctgttggagctttttgaattccgtgtaagacttgttggcatcgtcacccgattctaccaattctttcagttcttcgataatggaaagtttgacttgaaggttttcttctttctgacgttcctgctcggctacaagtttgcttcgtttttctttgattacccccattaggcgtttaaattccacttccaccgggtcttcttcgggaacgaaatcttcttcggcgccgccgttgtcggtaaactgttttttagcagcttccagttcggcattatgtagcttgtagaatgattgtttcagattgtctatttcctgcttgttcgcattctctgcgtcttgtgcaagctctttcaatcggtttagtacgtcttcctttgtggcaggtttaggagctgcttcaggttgaacttcggcagtcgtttcttcagacggagtttctgtaatggcttcagaaacctcgactgttttcttttcttcttctaattccccttggttcaagggctgattagtgtcatgagcgtccatcattgtatattagttttgggtcacaaattaatgaaataaaacgattacttcatactattttgcttattttttttcgtttattctgattttatgataataaaacggtgattcccatgtagagcatcatgccgataatgtcgtttgtaatagctataaatggtcccgttgcaatggcggggtctattttaagtttttcgagagtcatggggaccagcgtaccgaaaatagaggcaaacatcactacggcaaacaaactgatagatacggagtaggtgactgttgctgttgcaccgaaccgtatgaaattatatgtatataccagcagggaaatgatagtagcattgattagggccaccaccgcttcttttgtcacttgtttgaatgtatttttggcatccagcgaactgttggcgaggccctgtacgacgatagctgacgattgcgttccgacatttccgcccgtaccaccgatcaacgggatgtataaagccatttcaggatgagcggcaaaggtcgaatcgaaatttcccaatatcatcgagttgccgattccgccgatcatgccgatcagtagccacggaaggcgtgccgttgtctggcggagaacattatcatccgtttctacatcctgcgaaagaccggaagccaactgatagtcacgttccgattgttcacggacttcgtccatgacatcgtcaacggtaatctgtccgacaagccggccgatactgtcgatcacggggatagccaccaagtcatacttctcgatcgcttgcaccacctcgtctatcggcgtatccacgtgtactgaaatcgggtctttctgcatcacgtgttttaccttggatacggaaggagacgttatcatctttttgagcgggaatatacctcgcaggcgttcatcgtcgtcgatgacatatacataataaatctcgtccagttcttccgcctgttggcgcatctctttcaggcattcgggcatactccagttctcattgacaagcaccatttccgtacccattaaaccaccggccgtattttcgtcatatttcaacaaatcgacgatgtctccggcttgttcgatgtcctcgatgtgcgaaagaatctcttcctgtttgtcctcgtccagttcacgcatcaggtctacggcgtcgtccgtatccatgtagtccacaaaccgcttggcgattgtttcggaaggaagcatatcgagaagttccttacgggcgtcctcatccatttcgacgagtacgtcggcagcggtttcgttattgagtagtcgatagacgaacttggcttcttccgggttcagatcgttgcacaattcggcgatgtcggccgggtgtaggtcggcgagaagctcttttacctggtcggcgtctttttgctcaatcaggtgtttaacgttgtcaatgtattcctcgttcatctgcttgtcaattacaaattacgaattacaacttacggctgaaggttcatctctttcagcgctatttccactttattggtcagatcgataaattcttctaccgatagctgttccgggcgtttattgaataatgtgtcttctgtgagcggacactcttttcccagaatcggcttaatagagttgcgcaacgttttgcgccgttgattaaaagtcgttttcacaacctgcttgaacaacttttcgtcgcagccaagctcctgcgtatcattgcgtgtcatgcggataacggcgctttttactttgggcggcgggttgaatacgtgttcgctgacggtgaacagatattctaccttataccatgcctgtatcaatacgctgaggataccgtaagttttgctgcccggtccggcggcaatacgttcggctacttccttttggatcatgcccgtacaacaggggataatatccttgttatccaacattttaaagaatatctgactggagatattatacgggtaattacctgtcagtacgaaaggcttgccgtcgaacagccggtggagattcattttcaggaagtcgtcctcgatgatatgatcttccagcgacggataagcttcgcggagataagctaccgattcatagtccacttccacgactttcaccggccgttcttttttcaccaggaactgggtcaatactcccatgcccggtcctacctccaaaataggcagttcggggaaggtgtcgaccgtatcggcaatatcttgcgccactttcaaatctttcagaaagtgctgtccgagaaactttttaggctttactaatttcatttaccaactaaataattacttttgcagccgacaaaggtaattcttttaaatgaagaacgtaccactatttaaaaaaaataaatagatgtgtcagcgaagctaatgaagaattaagcatgaagaaactattaaagaagacgctgaaactgatattaccgattgttttgggcggctttattctattttgggtatatcacaactttgattttacaaaggtgggtgaggtgttgctgcacggtacgaactggtggtggatgttcttttcgttattatttggggtgctcgcacaggtgtttcgcggctggcggtggaagcagatgttggagccgttggaagctttcccgaaaaggagtgattgtgtgaatgctattttcatatcgtatgccgcgagtctgatagttcccagggtcggggaagtgagccgttgcggcgtgctggccaaatatgataatgtttcttttgccaagtcgctcggaacggttgttacagaacggctggtcgatacattgacaattcttctgataacaggcgtcacggtgttgcttcagctgccgatatttgttacttttcttcagcagactggaaccaagataccttcgctcctgcatctgctgacttccgtgtggttctatatcgtcctgttctgttttatcggagtgggaatgcttctttattatttacggaagacgttgttcttttatgaaagagtgaaaggttttgtgctcaatatttgggaaggtgtgatgtcattgaaaggagtgcgcaatatacctctctttagtttttatacattggctatttggggatgttatttttttcacttctattttacgttctattgcttcgcttttactgctcatctgagtatcctggcggcgctggttatgtttgtaggcggtacttttgcggtgattgtgcctacgccgaacggagcgggtccatggcattttgcggtcatttcgatgatgatgctttatggagtaaatgaaacagatgccggaatatttgctctgattgtgcacgggattcaaacctttttagtagttttgttgggcgtatatggtttggcggctttgtcgttgaccaatagacagcgaaagtaatcactataaaaatagatttgttatgagtactattctttctttagctccacaaaacgtatggaagcatttttattcgttgacacagattccccgtccgtcgggatacatggaaaaagtaacagaatttctgattaacttcggaaaaggcttgggactggaatcttttgtagacgaagcaggtaacgtaattatccgtaaaccggcaactccgggaatggaaaaccggaaaggtgtgattcttcaggcacacatggacatggttccgcagaagaataacgatacggtgcacgattttgaaaaagatcctattgaaacttatatagatggcgactgggtaaaggccaaaggaactacgctgggagcagataacgggcttggcgtggctgctatcatggctgtgcttgaagcgaaagatttgaaacatggtccgctggaagcactgattaccaaagacgaagaaaccggtatgtatggcgcgttcggtctgaagccggggacagtgaacggagaaatccttctgaatctcgattcggaagatgaaggcgagttgtatatcggttgtgcaggcggtatggatgtcactgctacactggaatataaggaggtagctcccgaagaaggcgatatcgctgttaaggttacgttgaaaggcttgcgtggtgggcattccggattggaaatcaatgaagggcgtgccaatgccaacaaattgctggttcgctttatccgcgaggcagttgccagttacgaagcacgcctggcaagttgggaaggcggcaatatgcgtaatgccattccacgggaggcacacgcggttgttaccattccagctgagaatgaagaagaattgttgggcttggtgaaatattgcgaagacctgttcaatgaagaatattcgacgattgagactccgatcagtttcacggcagaacgtgtggaagttccggcaggtcaagtgcccgaagaaattcaggacaatctgattgatgctatttttgcttgtcagaatggtgtgacccgtatgattccgaccgttcccgatacggtagagacttcttccaaccttgctattataacaattgccggtggaaaagcggaaattaaaattttggctcgtagctccagcgatagtatgaaggaatatctcactaccagtcttgagtcttgtttctctatggcaggtatgaaggtagagatgacaggaggttattccggttggcagcccgatgtgaattctccgattttgcacgcgatgaaagcgtcatataagcagcagtttggcgtggaacctgcggtgaaggtgattcatgcaggtttggaatgcggtattatcggtgccattattccgggattggatatgatttccttcggtcctaccttgcgctcaccacattcaccggacgaaagagcattgattcctactgtacagaagttctatgacttcctcgttgcaactttggaacagactccaatgaaataaatgctattctttcctattatataataggtctcttatagaaaaaggcacggatgaaatgttatccgtgcctttttgtcatatttgctgccttaaatattacgattttacttcataacaaataaattaattgatgcaaatcaataaatatgctataaaacataaaattcttcctttttggggtacaatgtataaacaaaggctgtatttttgtgttgtataacatgtaaataagaggataacaaaatgaaaaggttagaaagattgtttagaaagatcggcgaagccgacgtacatgtttggggatattcaacaattaatattcgcccgaacgaggaagcttaattttttagttttcaagtattagtaatttaaaagtttaaagattatgaagaaaataagttctttagttagaaaaatcctcagtgaagtaggtcgtaacgaaatgcttgcatgggggtacagaattgaaaaatgagagagagaacattagctaagtttgcagtggggatacgttattgaaagcgttatccccactttttttgcttcttataagtcccggatattgtattcactgtttttttcgatagaagaaggttgtgtacgacaaaacagttaccgtccgagttagtttcctttgcttgaaactaaagtttcatcagttagaaactatggtttcatcggtaagaaactaatggtttcaagtaactgaaactgaagtttccagcgtatggaaccagggtttcgagccgcgaaaccaacagtgttaaggcgtagtgtcagtttttcatgttcaatccaattccaggtgacagcattattgccgtcacttgctgctgtcacttgttgctgtcacatctttagttgctcataatcatttggttaggtcgcgtttcgtgacaggtgacagatatatatcataaacaatttgttaggagaggattaacggcgataactctgttttatgatcacaatcattgtggttgttatatctgttatgattgtgcaaatctattatatttattcattagtgtcccgttaaaatgggacgagttaaacaattaatcaaaaagccccggaatcaggggatcatttagatctttgacatcattgaaattagtcttgtcgaacaggtcacgcaagtgggttttgtcagtcaatgatatgctgagaatttgcaaaacttcataggttgaacgtttcaacttcatatcatgttggacaatagccacaagacagtacgtgataatagccacactgatttgtatgcgaacagcgttctctgttgtgccccagaatttctttatcttgagatgctgcttgagccatttgaagaacagctcgattaaccatcttttcttataaagattggcgacatccagtgcagaaagttgttttgcattcgtcaagaaagtgaactcacggtcatcctcttcgtcgtaatatcggacgagtctgaatgactcaggatattttttctcggagagatatccggtcagtttcacttccgcatctgtcattatgttctttggcattcttcgcttccatttgactgtcttatactttaagtttgtcttggctctgacaacaaagaaagagtctgtaagatgtatcctatagagttctttaaaggagtcataagccctgtcgaatatataataagcatttggttcataatggattgaagacattgctgtggaatcatgctttgaagcagtggttacggtatagaaagcaggaacttgtgcttcaatgtcgtataagacatgagctttcacccctcctttcttgcttcggaactttgcccatgggaatgttgcaagacacaacggaatcgttgttgaatcaaacgcatatttctttccggaaatgtcaaggatgttggtcgtccgcttctcgcaggcttccttcatcatatagaatgcaaagtcttcgaagattctgtaatcacggttctggttggctgtcgcaagagttgttttggctatcggttcacgacctaaaccaagatgatattgcttggccctatgcgcctcgaaagcaacgattaagtctcgcaggctttcacggttactcagttgtccaaacatcatcgcgagcatctgattccagcaagtgaaatgtttcacatatctgttgccatcatacttgcgaacatagttgttgaactgagtcctgttcagaaaagcggttaattgagagaatacgtatttgtcttggaacatagcagccatttgtattagactgcaaagttgcaaaatcaagtccgtttcattttaaaaaaccgcgtaattgactatatttcaataatttcaaagaactaattatccacttttacgggacagtagtgatatttattcaaaaaaagatgattgtttaaactttatttctttactttgttatttatacagtgagacttatagcgaacttaaactagaaagattatgaaaataaggcagatttgtatggtggtgctgttatggttgggagtgattccggcagtgcaggcacagagtttcgacaaattatggaaagaagtagaacaggcaggaaaaaagagtttgcctaaaacagtaataaaattgactgacgagatttaccggaaaggagaaaaagaaaagaattccgcccagatgctgaaggcatatatgtggaggatgaaatatcaggaaatagtgactcccgacagtttttatgtcggtctgaccgggctggaacaatgggcgaaacaaacaaaacagcctatggaccgtgctatattgcactcattgatagcgggaatctatgctgattatgcagccaataaccaatgggagctccggagaaggacggaaatcgtggaggaagctccttccgcagatctacgcgaatggacagcaaatatattcgtagagaaagtgcggacaaatgtgaaagaggctctggcggactctgtgctgctgctcaaaacgtcctcacgcgattatattccttttgtggaattaggggagactagtgaatattatcaccatgatatgtatcatttgttggcttcccgtggcatagaatccttgaaccggatagaaagacttagtagcggaacattaccgggcgatatttcttcggatccggtaaaacaggatattatatctatctatggaaatatgatttccgcctatcaggcagccggtctgaacgaaggatacgtgttggcactgctcaactatttgcagtggcgacgcatggcggatcaggcgttccgttccttccaggctaaaaacgggttgataggactgacgcaagatccttatttggctgcattgaatgaactgaaaagcaaattcaaatcggaaccgatatgtgctgaagtttatttggcgcaagctcagtttgcaattgaaaaagaccagccggtaagtgccttgaaactgtgtgacgaggcaatcggactttatccgtcttaccataggattaatgctttgaagaatctgaggcaggagattctatctccttacttgaatgtcaatgtgatcagccaggcttttcccggcgaagaaattaaactgagagcttcgcataagaatctggacggttttacggtacgcctttttaataaagcgaagaagttggtgaaggaacagcattattcggttcttcgtccggaagattatcggacgcaggacacggtgttcactttcaagtccccggaagtgggagcttacgtcatgcgtattgttcctgatattcgtgccaagcgggatagtgaaagtgagtttaacgtgacccgcttcaaagtgttgacgtgccgtttgccggggcaacagtatgaagtggcggccttggacgctcaaaccgggcatcctgtacccaacgcaaagataatattgtatagtaatgacgaaaaagtgttgcaggagtttacgacgggagaagaaggaaaagtggtgttcccctggaaatccgaatacagatatttgaaagcttcgaaaggcgtggatacagccatgccgaaacgaagtatttacggcggaagctacggttattacgatgatgaggatgaagcgacggaaagtatgacgttattgaccgaccgttccttgtaccgtcccggtcagacagtgtatgtgaaaggtattgcttatatgcagaaatcggatacagctaatgtgcttcccggtaaagattatactgtaactttgttggacacaaataatcaggaagtggggcgtaagtcggtacgtaccaatgaattcggttcgtttaccaccgatttcgcattaccttcggcctgtctgaacggaatgttttctttgacggcgggagaaagtagaacgaatatccgtgtggaggattataaacgtccgacattcgatattacgtttgaaaagcaaacggaaagttaccgactcggagatgaagtgcaggtaaaaggcaagatacagtcttatagcggtgtgatgcttcaggaccttccggtgaagtatatggtgaagcgttctgttcgcagtttctggaggatttcggaggctgtacagattgcttcgggtgaagtgactgccgacgggaacggagaatttacgatcccggttcgcctggaagaaagtgcagattataagaataatgataaaatatattatcgttattctgttgaagcgactgttaccaatgcggcaggtgaaacacagtcgtctacggagatgatttcggcaggacagcgttcattgattttgcagacggagttgaaagaaaagatttgcaaggataggccgttcaacattgtgtttgaagcacagaatctgaacggacagcctgtggaagtgaaaggtacatactctttatatccggcgaaagataaggactacaagcaactgggcgagaaaccggttgcaaccggaacgtttacttctaataaggaaatgaccttcaattgggggaaattttcttccgggccgtatgtgctgaaggcaacggtgaaagataaccagggaaaagaagtgacggcggaagcaaatacgattcttttctcttctgacgacaaacgtccgcctgttcagtccgccgtgtggttctatgcagagaatacggaatttgacactgctcatccggcggtattctatttcggaacttcggaaaaggatacctatataatgatgaatgtattttgcggtgataaactgctggaaagtaaggcactgaatctgtccgatacgattgttcgttttcaatatccgtatcaggaaagttacggtaacggtatcttcgtgaacttctgtatggtgagggacggacaggtttatcaggaacgggttcaggcgagaaaacgtttgccggacaagacattggtgatgaagtgggacgtattccgtgataaattgcgtcccggacagaaagaggaatggaaactgacaatcaagacaccgcagggacaggctgctcatgccgaaatgttggcgacgatgtatgatgcctcacttgataaaatctggaaccgccggcaggatttccgggtttactaccagcaactgcttccttattccgattggatgaacggatatgttggaaataactcctacaattattggtgggatcgtaagtctctcaaagtacctgcaatgttgtatgacagattcgctatgcagcctgatataagaaatgcatatgcgatgtcagaatccatagctgatggagtagtggtcagaggatatgcagtgcaaaagaaaatgtcggtgacaggcagcgttgtaagccggagcaatgcggtgagatatgcatcggcgctagtttccgaagatgctgcggatacaatgtttgaatcggagttagtgccaatggcagcaggaaaggccgatgtcgcttccggagaagaagcgcttcctgaagctcctgccggcttgcgtacaaatcttgccgagactgctttcttctatccccaactccgtaccaatgagcagggagaggtttctttctctttcactatgcccgaaagtctgacacgttggaatttccgtggatatgctcacaccaagggaatgttaatgggaacgctggacggagaaactactaccagtaaagaatttatgctgaccccgaatctgccacgtttcgtgcgtgtgggcgataagacctctattgctgcctctgtctctaacatgactggcaagccgcaagcaggaacagtaagcatgattcttttcgatccggtgacggagaaggttgtcgacacacagaaacagaagttctccgttgaggcaggcaagacaattggcgtgaacttcatgtttaccgtcagtgataaatacgaggtattgggttgtcggatgatagccgatagcggcacatttagcgacggagagcaacaattggttccggtactcagcaacaaggaacatttggtagagacactgcccatgcctatacgtggagaagaaactctcaccttctcgctcgacagtttgttcaaccggcatagtaaaacggcaacagaccgtaaactgacgattgaatttaccggaaatcctgcttggtatgctattcaggcattgccttctttgagccttccggtcaataataacgctatttcatgtgctaccgcctactatgcgaatacattggcttcgtatataatgaacagtcagccacgcatcaaggctgtgtttgatagctggagacttcagggcggtacgaaggaaaccttcttgagcaacttgcaaaagaatcaggaagtgaagaatattctgttgtccgaatctccgtgggtactcgaagcacagactgaagaacagcagaaagagcgtatcgctacactgttcgacttgaataatatccgtaacaataatatcgctgcactgaccagattgcaggaattgcaaaattccaacggtgcctggtcatggtataaaggaatgaacggcagcggttatgtcacggcctatattgccgaattgaatgctcgccttgctctgctgaccggtgagaagttggatggaccagcacttgctttacaggaaaaggcgttgacttatcttcaccaatcagctttgaaagaatacaaaaatattcttaaagcacagaaagaaggagtgaagttcacaggagtgtcgggctctatcctgcaatatctgtatattgtcgctatttccggcggacaggttcctgctgccaataaagctgcgtatgcttattatctttctaaagtgaaagagttgcttccgacagcttcaatgaatgcgaaggcgattgctgctatcgtgctcgataaagccggacaaaagaaagaagcgcaggaatttgttgcttctctgaaagaacatctgacaaagacggacgaacaggggatgttcttcgctttcaacgagaatccttatgcgtggggaggaatgaggatgcaggctcatgtagacgttatggaagctttggaattgatcggcggaaacagcgaaacggtggaagaaatgaaactctggctgttgaaacagaagcagacgcaacaatgggattcccctgtaactacggcagatgcggtgtatgcactgttgatgaaaggtactaatttgcttgacaatcagggcgatgtacggattgtgattgccaatgaagtactggaaacggtgagtccgagcaagactacggtgccgggactgggatatatcaaacgttcgtttatacagaagaatgtcatggatgcccgcaagattgaagtggaaaagagaaatccggggattgcctggggagctgtttatgcagaatatgaatcgccgatcaaggatgtgaagcaacagggaggtgagttaaatgtacagaaacaattatatgtggaacgtacggtgaatgatacccctcagctgcaaccggtcacggcaaagacggtgcttcaggtaggtgataaggttgtttcccgtttgagtatccgtgtagaccgtgcaatggactttgtacagttgaaagatcagcgtggcgcttgtttcgagccgatcggcagtgtctccggttatcgctggaataacggaatcggctattatgtggacattaaagatgcttctaccaatttcttcttcgatcacttggggaagggagtttatgtactggaatatagttaccgtgtcagtcgtgcgggaacttacgaaacggggctggcaaccatgcaatgtgcctatgcgccggaatatgcttctcattcggcttcaatgacggtagaagtgaaataattaacttattaacggtgaacggtaaacgttcaccgttaataatcctttcaatacgtttcatatctcatctaaaactcctacatttgtacaccaaaataaaatatatcacatgaaacgtagtttactatctatattttttctgcttattgtcactttggcagctgtcgcccaacctcgtatttcttctaataaggagacgcacaacttcggacaaatagaatggaaacgtccggtgacagtggagtataccattaccaataccggaaatctgcctttggtgctgaccaacgtcaccacttcttgtgcctgtgccgtggccgactggacaaaagaaccgattgctcccggagcgaaaggtattgtaaaggcttcatttgatgccaaagcattgggacgtttcgagaagtcggtcggtatttatagcaatgctactccgaatctggtttatctgaagtttacgggtgaagtggtgcaggaaataaaggattatacgaagactcatcctttcgctatcggtaatatccgtatcgaccgggatgaatttgccttccccgatgtatatcgcggacagcaaccaactatgacgttcagcattgccaacctttccgaccgtccttatgaaccggtactgatgcatcttcctccttacctgaaaatggaggcggaacctaaagtgttgctcaaaggaaagaaaggaactgtcaaactgacgctggacgccagccaactgaatgattacggattgacacagacttccgtctatctctcccgttttgccggtgataaggtcagtgaggataatgaaattcccgtttcggctattctacttcccgatttctcgcggatgacggcgaaagattcgttggacgcgccggctatccgtatctcggaaacaaatatagacctcagtgtaccattgataaagaaaaagaaagccagctacaatatcttgattgctaatgccggaaagactccgttagtaatcagtaagttgcaggtgtttaattcttctgtgggcgttagtctgaaaaagaccgtgttgccgccggacggaatgacgaagctgaaagtaacgattcgtaagcgtgacgtcggtaataagaagcatcatttacgcattcttatgattacaaacgacccgttgaatcccaaagttgaaatcaatattaaacgctaaattctatgactatggaacatcctgaaaatagtggagaatacaaagggcttgttgtcaacaaaggcatcgagcagccttcgtctgtaaatccttacctgaaacgtaagccgaaaaagcgtcagctttcggtggcggagtttgttgaggggattgtgaaaggcgacattactattttgagtcaggctgtgacattagtggaaagtgtgaaaccggaacatcaggtcgtagcacaagaggtgatagagaaatgcctgcctcattccggaaattctgtccgtataggtatcagcggagttcccggcgcgggaaagagtacttcgatagatgtattcggtttgcacgtgcttgaaaaaggaggaaagctggctgtgttggctatcgaccccagtagcgaacgtagtaaaggcagtatcttaggagataagacgcgtatggaacagctttccgtacatccgaagtcatttatccgccctagcccctcggcaggttcgttgggaggagtggcacgcaaaacgcgtgagacgattgtactctgcgaggctgccggattcgataagatttttgtggaaaccgtcggggtgggacagagtgaaacggctgttcattctatggtagatttcttcctgctgattcagttggcaggtacaggagacgagttgcaaggcattaagcgcggtattatggaaatggccgacggcattgtgatcaacaaggccgacggggataatctggaacgtgcaaaactggctgctactcaatttcgtaacgctttgcatcttttccctgctcccgaatcgggatggactccccaagtgttgacctattccggtttttataatatcggagtgaaggagatatgggatatgatttatgaatatattgactttgtgaagaccaacggttattttgaatatcgtcgtaacgagcaaagtaaatactggatgtatgaaacgatcaacgaacaacttcgtgacagtttctatcataatccgaagattgaagccatgcttctggaaaaggaacagcaagtgttgcaaggaaatctgacatcatttatagccgcaaagagcctactcgatacttatttcgcagacctgaaacgggacgactagaaaaagaacgttaaaaagcggatgaaaaaataggggtggtatgctttctgattgtatttacattcagagaaccatgaatattggacacagaatattatttattgacttaaaataccttatgaacaaaaccttgttaacaggtcttctgtgctgcaccctcacagtacagagtttcgcagaccaacctttggaagggtttacctatgctaccttgaatgctccgacaggagcggagtgggaatctcccgaaaacttggcactcaataaggagcagccgcatgcttatttctttccgtttcaagacttggaaagtgctcgcaaagtattgcccgaaaacagtaagttctggcagtctctcaatggcgactggaagtttcattgggcacccgaccccgattcccgtccggcagatttctatcagacgaattatgatgtgacttcgtgggacgtaatccctgtaccgtcgagctggaatatctatggtattcagaaagacggaagcttgaagtatggaactcctatttatgtcaatcaaccggttatcttccaacatagcgtgaaggtggacgactggcgcggaggagtgatgcgtactccgcccgctaactggactacttataagcaccgtaatgaggttggttccttccgccgcgattttgagattcctcaggattgggacggcagggaagtattcatcagtttcgatggtgtggattctttcttctatctttggattaacggtaagtatgtggggttctccaagaactcgcgcaataccgctaatttcaatattaccccttatcttcagaaaggcaaaaatatcgtagcagctgaagtatatcgtagctcggatggttcatttctggaggcacaggatatgttccgtctgccgggtatcttccgtacggtagctttgtactcggttcccaaggttcatttccgtgacttggtggctattcccgatttggacgctacttatacggatggttctttgactatcaacgccgatatccgtaacttggataaaaaggcagccaaggattataaagtatattattctttgtatgccaataaactgtattctgatgaaaatacgttggtagacggcgtttcatctccggtaatagagaagatcgttccgaatgagattggtaaggttcaaactgtttttcaggtgaaggctcctaacaagtggtcggcggagtttccttatcgctatacgcttgttgctgaactgaaagataaaaagaacaggactattgaaacggtttctactatcgtaggtttcaggaaagtggaaatcaaagatacacctgcgtcagaagatgagttcgggcttgccggacgctattattatgtgaacggaaagaccgttaaactgaaaggggtgaaccgtcatgaatccaaccctgctgtgggacatgccattacccgtgagatgatggaaaaagaaattatgctgatgaagcgtgctaacatcaatcatgttcgtaactctcactatccggatgatccgtattggtacttcctgtgcaacaaatatggtatctatctggaagatgaggctaacatcgaatcacacgaatattattatggtgccgcttcgctttctcatccggtggaatggaaaaatgctcatgtggctcgtgttatggaaatggtgcatgccaatgtcaacaatccttctatcgtgatttggtcgttaggtaatgaggccggtccgggtaagaattttgtggcggcttatgatgcgttgaagaagttcgatacttcccgtcccgtacaatatgaacgtaacaatgatattgttgatatgggttcgaatcagtatccgtctatcggttgggtacgtggtgctgtacaggggaaatatgatattaaatatccgttccatatctccgagtatgctcattcaatgggaaatgcttgcggtaatcttattgattattgggaagctatggagtctaccaacttcttctgtggcggtgctatatgggattgggtagaccagtccatgtataattacgatccgaaaacgggtacgcgttatctggcttatggaggtgacttcggcgatactcccaatgatgggcagtttgtaatgaacggaatcgtgttcggagatctggaaccgaaacctcaatattatgaagtgagaaaagtatatcagaatatcggagtgaaagctgtcgatgttgagaagggtgtctttgagatcttcaataagtattatttcaagaatctggcggacgactactatttgatgtggtccgtttatgaggacggcaaggctattcaggcaactctgaagaaagacatcaatctggctccccgccagcggatgcaaatctctcttccctataatcgtgctgcgtttaaaaaagatgcggagtactttgtgaaagtgcagtttatattgaaagacaagatgccttgggctgataaagacttcgtaatggcggaagaacaggtactggtgaaggaagctacggatcgtccgttaatcagtgaagtggctgctgctactgcgggaagtctgaagagtcgtatgaacccgagtacagagagaatcgaaattaaaggggacggctttgaagcggaattcgatcagcagaccggaagtatttatagcttgaaatacggcgataaaacaattattgcggccggaaatggaccgaaacttgatgcacttcgtgcctttacaaacaatgataactggttctatgctccttggtttgaatatggtttgcataacctgcaacataaaatgatagaggtaacagctcgtgagaaggatggtaaaatggtattgagttttaccgtagaatcgcaggcgccgaatgctgcaagcattaaaggggggaccagttccggtaagaatagtattgtggaactgacagaccggaaatttggagccaatgactttaagtttattaccaatcaggtgtggacggtttatccggacggttctatcgaattgcagtccagtattacttctactcgtcccagcctgactttgccacgtcttggctatgtgatgaaagttcctcaggaatatgctaactttacttattatggtcgtggaccgattgataactatgccgaccgtaagagtggccagttcatagagcaacatacgaatacggtagcgggtgagtttgtgaatttcccgaagccgcaggatatgggtaatcatgaagatgtacgttggtgtgcattgacgaatcaggcaggacaaggggcagtctttatagctaccgatcgcctgtcggtgtctgcacttcaatattctgctcttgatttgatcctggcttctcatccatatcaattgcctaaagcaggtgatacttatttgcatctggattgtgcagttaccggtttgggtggtaatagctgcggtcaaggtggccctcttgttcaagacagggtatttgccggtcatcataatatgggctttattatccgtccggttgttggtgcgaatttggcagctgttgctaatgttgctcctgccggagatattcctttgtctatcacacgtactcctgccgggatggtagaattgacgtcggcaaaaaaagacgctgtattctgctatacgattgacggtagtaaaaaggtacaggaatatacagaacctattcctttgcgtaatggaggtactgtgaaagcatggtataaggacaataaggatattagtgccgttatgaagtttgaaaagatagaaagtatccagatgcaggtggtatatgccagcagccaggaatcaggcgatggagatgctgctaatctggttgacggtgatcctagtacgatatggcatacaatgtattcagtaacggttgccaaatatccgcattgggtggatcttgatgcaggtgaagtaaaagaaatcaaaggctttacctatctgccgcgtcagaatggaaataatggcaatatcaaggattactctattcaagtcagcatggatggtaaagaatggggtgatccggtcaagaaaggtacttttgctaataactcaaaggaaaagagggtgatgttcgacaagccggtaaaggcacgttatattcgctttactgctttgagttcgcagaacggacaagactttgcgtccggtgcagaagtgactatcctggctaactagaataaaactattcaggcacagattacacggacttcacagttttagtcaatcaaaggactgtgaaatttgtgtaatccgtgtctgataactaataatgattggtggttattacaattcccttcccgctttctcgaaatcagccttcgacttactttgcgttacaatatatacaccgagaaatacgagcgcaatggcaagtcctttctgccagccgaaacttccgattcccataataatggcagcaatcgtagccacaatcggctgcatataattatacatactgacaacggtaggacgaagcagtttttgtgccgtcataatgcagagataggctaggaaacttccccctagtactacatagagcacttgtatgatagcaacggtggaaatagaggcccactgaatcgttgaaatgtcataataggagaaaggtatataacatatcgaggcgtaaacgaacatccatttattgattgttaccgctgaatactgctgagatagtcctttgaataccgtcagatagatagagaaactgatttgtgctaccagacagagcaagtcgccgataaggtttctgttaccgccacttgcagcctgactacttaaaataaggataagtgcccccatagcacctacaaaaattcccaataccttcttgtttgtaatcggttctttcagataaatggcagccacaatcatggttactatcggcaaagtagtagttacgatagaggcgtcgataggcgaagtcatggaaagtccgaaaataaagatcccctgattaaatactaaggcaaacagagaagcaaagaaaatctttagcatatccctgtggttgacgtgctcttgtttacagaatatagataacatccagaaagcagccgcagctcctatcatacggaatgtagtgacggaaagagcggaaaactcttgcagagccgatttaccaataggagccattaagccccacataacgtttgctgtcaacgcaaacagatgaccgtgtagattcttacttttgtccatgctgataatagtgatctaatataatcttataagaataacatctaattagaaaaaacggttggcaaaggtaacttttttattcttgtattttctcaatccggtaaataaactgacatactttgagaaaaaatggcaaggggaataattcttccctgcacagacaaaaacttaatcataataagcatttgataagtgataaagaaaggtgttgtggcagacattgcgatactatgtaatcatcttcccggcggactactgccagaccgcgtccttgtccacaccggagatagaaatgaagtagtctcatttctgttgaaacagagaaaggagaagacgataaaacaaaatgtcccgtttgtgcatgaaaacgggacattttatttatatttgccttgattaaacttgaatattatggaacaacaagccaattatatccgtcgtatcgaaatccacggactatggggacgttttaatataagctgggatttacgtcccgacgtaaatatcctttccggcattaacggagtggggaagacaacgattctcaatcgttccgtcggctatcttgaagacctttccggcgagatgaaaagcgacgaaaaaaacggcgtgcgtcttttcttcgacaatcccgaggccacctatataccgtatgatgtgattcgcagttacgaccgccccctgattatgggcgactttacagcccgtatggcagataagaatgtgaagtccgaactggactggcagctctaccttctccaacgccgttatcttgattatcaggtcaacataggcaataaaatgatagaaatgctttcgagcaacgatgaagaagaacggcgaaaagccgcgaccctgtcgattgccaaacgtcgttttcaggatatgattgacgaactgttcagctatacccgtaagaagatagaccgtaaacggaacgacattgctttctatcaggatggcgaactgctgtttccctataaactgtcttccggtgaaaagcagatgttagtaattctgttgacggtactcgtgcaggacaacagccattgtgtgctgtttatggatgaaccggaggcttcccttcatatcgaatggcagcagagattaatttcaatgatacgggaactgaatccgaatgtgcagattatcctgactacccattcgcctgccgtcattatggaaggttggctggacgccgtgacggaagtgagcgatatatccacctcgttggaacatacgtttgaaaaaggatgttcccaaacgaaaccataatttgtacaattagtaactatcaacatggcaacttcactaagagataacctgacttcttcttacttcaacgctgcccataaactctactcgaagaaggcgcgccggcgtatcattgcttatgtagaaagctatgatgatgtcgcattctggcgtacgttgctcgaagaatttgaagatgatgaacattatttccaggtgatgcttccttccgccacctccctggcaaaagggaagaaaatggtgttgatgaatacgctgaatacaaaggaactgggaagaagcctgattgcctgtgtcgacagtgactatgattttctgttgcaaggagctaccaatacctcccgtaagattaaccggaacaaatatattttccagacctacacttacgccattgaaaactaccattgttttgctgaaagtcttcatgaagtgtgtgtgcaggctacgttgaacgaccgttttattctcgatttcgatgcttacctgaaacgttactcggaaatcgtatatccgcttttcctgtggaatatctggttctaccgccagcgtgatacttatacctttccgatgtatgacttccatacatatacggctttgaaagagataagtttgaggcatcccgaacacagtctggaagctttacaacaccgtgtcaatcagaaactttcggaattgaaaaaacgttttcctcgtattgtcaatcaggtgaacaacttacgtgatgaattgaaggaactgggattaatgcccgaaacgacttatttatatatgcagggacatcacgtaatggacaatgtcgtgatgaaactcctgattccggtctgtactgctctgaggcgtgaacgggagcaggagatcaaacgcctcgcagaacataatgaacaatttagaaacgaactgacctgttatcagaacagtcaggtgaatgtagagatcatgctgaaaaagaatgtagcctataaacggctctttcattacgaatggctccggcaggacattcaggaatacttggcgaaaggagaatgaaataaacaatagataaaagagaactaaaccaaaagagaaaaaatatttatgaaagaagtaattgatacggtgagtgtagcattagcgagtggggaagtggaagaattgggaggagcagtgatgcaggaagtcaaccgctcgttactatcggcaggagtgaacgaagaatgggctgacaagattgacaatctgatagtgctgctgtttattatcggaatcgctttactggctaacgtaatctgccgcaggatcatcttgcgggtagtggcaaaactggtgaagcaaactaaggcgacgtgggatgatatcgtattcgatcataaggtaatggtacatcttagcagaatggtggcaccgattctgatttatattgccattcctattgctttccccgaacatgctgattccgggttgctcgatttcttacgcaggctttgcatgatttatatccttgcagtattcctgcggtttgtcagttcgttgtttactgccatttatcaggtatacagccggaaagagcaatatagggacaagcctttgaagggacttttgcagacggcacaagtcatccttttctttataggggctattatcatcatcagtattctgattaatcaaagtccggtggtgttgttgacgggactcggagcttctgctgccgtcctgatgttggtattcaaagacagtatcatgggatttgtgtccggtattcagctttctgccaacaatatgctgaaagtgggcgattggattaccatgccaaagtacggtgcggatggtacggtgatagaagtaaccttgaacaccgtgaaagtgcgcaacttcgataataccataaccaccattccgccttacctgctggttagtgactctttccagaactggcagggaatgcaggagtccggtggccgccgcgtgaaacgctctatcaatatagacatgagcagcgtgcgtttctgtactccggagatgttggcgaagtatcgaaagatacagttgttgaaagattacgtagaccggacggagaaagtagtggaagaatataacaaagaacataatattgacaattcagtactcgtaaacgggcgtcgtcagacaaatttgggcgtttttcgcgcttacctgactaattatctgaaaagccttcctaccgttaatcaggaactgacttgcatggtccgccagctccagccgacggaaaccggtatccctctggaactctatttcttttcggccaataaagtctgggttgcctatgaaggcatacaggcagacgtattcgatcatgtgcttgccattattcccgaatttgacttgcaagtattccagaatccttcgggtgccgacctgcgccggataggagtaaaaatagagaaataagtattagaacaataaaacactgttaactatccattgtcatgactacaccgttaccaaatcagataatccgcgaaatcactcctctatcagacaaggactgtttttatattgcagaacgttataagacagaatttacttatcctatccacaatcattccgagtttgaactgaactttaccgagaaggcggcgggagtgagaagggtagtcggagattcttccgaagtgataggcgactatgatttggtcttgataacaggtaaagacctggagcacgtctgggaacagaacgaatgtcgttcgaaagagatacgggagataacgatccagttttcttccgatcttttcttcaagagctttatcaataagaaccagtttgactctatccgccggatgttggataaggcgcagaaaggactttgtttcccgatgtccgccattcttaaaatatatccgttgctcgatacacttgcttctgagaaacagggattctatgcagtaatcaagtttatgacgattctctacgaactctccctttttgaagaagaagcccgcacattgtccagttcgtcttttgctaagatagatattcattcggacagccgccgtgtgcaaaaggtgcaggagtatatcaatgcccattatcaggaggagattcgcctggggcagttggcagctatggttggaatgacggatgtgtccttcagtcggttcttcaaactgcggactggtaagaatctctccgactatatcattgatatacgtcttggttttgcttcccgcctgttggtggattctaccatgtcaatagccgaaatctgctatgagtgcggattcaataatctttccaacttcaaccggatcttcaaaaagaagaaggcttgctctcctaaagaatttcgtgagaactaccggaaaaagaagaagctggtttaaggtccgtacatctcttccattagttgttcgcaagctttctggagatgttctgagtgggggcttgtgccaccggcttgtcacagttgtgccatcgtggtgtcacagttgtgccaagccgatgtcacagttgtgacaggccggtgtcatatcctggcactgagtttgtctgtcgtgtaataatcttgcaacctatctttcaaccgattgtatcttctccgtattactgttgtaacacccaccccctacctttgcccacggatttaaaacgtagagcaaagttcgatgaaaaaactatttcttttaagattttccgttgcagcctttttttgtatgctgtgtgtactttcttcgctggctgctaatatcaaggtgaaaggagctgtgaaagataaactttccaaggagcctttaatcggagcaacgattcgtctgataggcactcaggccggagccgtcactgatatggacggtaattttgagttaaatgccggtggtgtgttggaaggtatgtatgatattgaaataaaatatgtaggatacaagaccgaggttcgtcgcaaggtccgtgtggagaacggcaaactggtgatactgaatctggaactggaaacggatgcacaggaacttgccgatgtagtagtcgtagcaaagaagaatcgtgagaatgaaaatatgctgctgctcgaacagcagaaagccgtcattgcagtacagtccgtaggggtgaaggaactttcgcgcaaaggtgtttccgatgcggaaggcgccgtaaccaaagtatcaggagtatctaaacaagacggagtgaagaacgtctttgtccgcggactgggcgaccgctataatgcaaccaccttcaacggcttctcccttccttccgaagaccctgaatataagaatatctctctcgactttttcggaacggacgtcatacagtccgtaggtgtcaacaaagccttcaacgcaggtggcagcagtgatgtcggcggcgcaacgatcgacatcgtctccaaagaactgataggtggcggaaacttcggtatcggcatttccggcggactgaacatgcaaaccttgacagccgatttcctcaaaatggacggggtggactttatgggttttgccaaccgcaccgaacctgccgacgaaaacacttggggatttaagaataaactcgaccctaccgaaaaacatctccagataaaccggagttacagcatttccggcggaaaacgtttctatataggtaagaacaagaatccgctttctttcttcctgaccgccggacatacaacagattatcagtatacggacgaagtgatacgcaataccactaccagcggcacaatctataaagatatgcagggaaaaaaatatgccgagaatatcagccaactgctactggccaacgtggactacgatatgaacaaccgtcaccacgtcagctataacttgatgatgatacacgccggcacgcagtcggtaggcgactacaccggcaagaattctatctttagcgatgattacgataacttgggattgacccgccgtcagcaatctaatgataaccttttaatcgtcaatcagttgttgaccaattggggactgaccaaatcattaagtctggatgccagtgcttcctacaatatggtgaaaggatacgagccggaccgccgcatcaacaatatcacgaaagcggaaaacggatacaccttgcttcggggaaactctcaacaacgctacttctccgcactggacgaagatgatattaatgtaaaagcaggcttggtctaccgcttgaaagacgatgtggaagaaatctccaatatccgcctcggctatacaggcagatttgtagacgacagtttcaaggctacggaatacaacctgaccgtggaacatgcttccgacttcccttcgctggatggtttctcgcttgatgattactataatcgggacaacttatcttccggctggttcaagattcagaagaatgtggacaagtatactgtcaccaagaatatccattcggcatacgccgaagctacttatcagtttaccccgcgttggattgtaaacttggggttgaagtatgattatgtagatatcaatgtagattataatgtgaatagaggcggttccgaaggaagcaacaccatccggaaagactatttcctgcccagcctcaatctgaaatataatctgaatgagaaacattccctccgcttgggggcaagcaagacctatacgctgccgcaagccaaagaaatatctccttaccgctatgtaggcgtgaatttcaacagtcagggaaatccgaatctgaaaccctcggacaactataacttcgacctcaaatgggacttcaatcccagcccgacggaactcgtttcgctgacagctttctataaacatatcaaagatccgatctcccgcattgaagtggccagtgccggtggatatctctcatacgagaatatttcggatcgtgcaacagttgccggagtagaggtggaaatacgtaaaaacctgtttgtccgtccgttgagcagtgctgcgaacggcatgaacaaactctccttcggactgaacggttcctacatttacaccaatgcgaagatgcctttggcaaccgtcaccaccggttcgcaactggaaggagctgccccgtggattgccaacttcgacctttctcaccatttcacccgagacgaacgcagttttgtcaatacgctggttcttaattatgtgagcgataagatttatacgattggaacgcaaggatatcaggacatcatggaacggggacttgtcacactcgacttcgtctcgcaggcccggttgaacaaatatctctccctcaacctgaaagctcgcaacctgctgaatccttcccataaattgagtcgcaaagccaatgagagtggcgaaaaggtagtgctcggcgattataaaaaaggaataaacatcagcctgggagtgtcgtgcacattctaagtcccggcaatagaaatagaataagataattgattacagaacttgattattaactgattactgaatagaattattaactaattattgaagcaaaatgaaaagattgtttgtgaactttatgacgtgtgccgctatggcaactgcacttacgttggctgcatgtagcagtgacagtgacggagaaggtaatggaaacggtaatggtggaaacggagagggcacaggtagctctatcgtagtgggcgacaacatcctgtccggaacactgaccggcgaacagacgctggaatctaaagaatatatcctgaacggaacggtaatcgtagccgacggtggccgcctcaatatccctgccggaacaacgattaaagctcgtgaaggtttcagcagctatcttttagtagcacagggcggtaaactctacgctgatggtacggcagacaagccggtcatctttactgccaacaccacttcacccgtttccggctactggggtggtatcattatcaatggtaaggctcctatctccggtcagaacgccgataagagcgatacgggcttgacggaaatcgacaacagttttaaatatggaggcaatgtagatgatgataactccggttcattgacttacgtgcagatctgttatgccggagcccgttccactgccgatatcgaacacaacggtctgacactgaatggtgtgggtagcggtacaaagatagaaaatatctatgtgctcgaaagtgccgatgacgcaatcgagttcttcggcggaacggtgaacgtaaccaatcttctggctgtaaatccggatgatgatatgttcgacttcacacaaggatatagcggtacgctgaaaaactgctatggcgtatgggaaaacggttataccagcacggaagcagatccgcgcggcattgaagcggacggtaatctcgacggcttgtatcctacccatctgcgccagtctgattttcgcgtggaaaacatgacgattgtgaataatgcagctgataaggcagacaacgtagaccgtatgcaggatgtgataaagattcgtcgcggtgcgaaagctgctatcgtcaacgcattggtaaagggtacgggcggttcaatcgacctgattgatatgagcgatagcaagggtgcaggtaatgcagattccagtgtcagcattacaaactcactgaacctgacaggaaagaaactgaacggtacattgaatacttttgccgaaccggcaggcaacacaggtacggacgtttctctgttcacctggacgggatataatttctcctccctctgattcttgactgctcgaagtctgtttttcagaaagacatgagaggtgtgtcataacttaataaggttacgattgaggtacctttgagttatggcacatcttttttatatttggtttctccttgtcaattcctctgttattagcaattatttcgtatattatataatcggtctgattttctttttcgtatatttgttccttgttatcctatgataaataaaatatgcaaacagactacgagcggtatattaagatgtcttctctagcccaaattggatggtgggaagcggattttgcggcagggcattatttgtgttcggattttctatgtgaactcctcggattggagggggataccatttcttttcaagatttccaaaagttgatacgtgaagattatcgtgagcaaattattcaggaatttcgtgcaaatgcgaatattcatcggaacttttatgaacagactttccccatccgttcccggtatggtgagatttggttgcatacccgcctggctcatcgtgagaaaggtacgggaaccaatggcggtgataaatccttcggtgtcattcaacgggtggaagcccctaaggagtcagaacaaagagacgctttgagaagggtgaacagtctgcttcgtcgtcagagttttatctcccagtctttgctccgtttccttcacgatgaagaagtagactcttgtgtcatggagatattgaacgacattctgaatctttactacggggaaggtcgtgtctatattttcgaatatgacgaaaatcacactcaccagagttgtatatacgaggtcgtttccgaaggggtatcgtcggaaaaaggcagtcagcagaatcttcctattgaccaggcaaaatggtggagcaagcagattctttccggtacgcctattctgttgaattcgttgaaccagttgccagaggaagcggaagacgaatatcgtttcctcaatgcacaaggcatcttgtcaatcatggtgactcctttaagggcgggcgaccatatttggggatatatgggcattgatctggttaagacttatcacgaatggagtaatgaagactatcaatggttttcttcacttgccaatattataagtatttgtatcgagttgcgcaaagcaaaggataaggttatccgcgaacaggtctttctgaataatttgttccgtttcatgcctatggggtatttgcgcttgtcgataatccgtgatgagcagaatcggccttgcgattataaggtgacggacggaaatagtttagttgttaaatttttcggtagttcgataaaagaatatatgggatgtcctgcctcgaagatacatcctgactatgtttcgaaactggagcttctggtaggtgtaatgcaaggtaacacgtataaggaaggagatgattatgttgccaagacgggcatttatactcactggattgtctattcgccggaggaagatgaagtggttgctttgttcctcgacactacgcaggcagtgaaagccaatcgagcaatggaccgtagcgaaaaactgttccagaatatatttgccaatatcccggccggtgtagaaatctacgacaaggacggctatctggttgatatgaacaacatgaatctggaaatattcggagtggtaaataaatcggaagtaatcggagtgaacttttttgaaaatccgaatgtccctcagcaaatccgcgaccgtgtgcggaatgaagatttggtggatttccgtcttaactactctttccggcgtgccgaaggatattatctgacgaaccgttcggatataatagagctgtatacgaaagttactaagttatatgacaatgaagggaacttcagcggatatatattgattaacattgataataccgaacgtattgatgccataaaccgcatccgcgacttcgagaatttcttcctgttgatttccgattatgccaaagtggggtatgccaagctgaaccttatgagtcggaaaggatatgccattaaacaatggtataagaatgtgggagaggaggaagatacgccgttgagcgaagttgttggtatctaccgccacgtgcatccggatgatcgccgatatattctcgacttctatgaggaagtgaagaagggcaacagacgccattttcagaaagaaatgcgtgttcgtcgcgtgggaaccatagaccagtggaactgggtgcgttctaatattatggtgactaattacaggcccgaggagaatgaaattgaaatcataggtatcaactacgacatcacggaactgaaagagacggaagcggaactgattctggcacgtgacagggcagaaatggcaggccgtctgaaaagtgctttccttgctaatatgagccatgaaatccgtactccgctgaatgccattgtcggcttctcggatttgttggttgaggcggaagatattgaggaacggaaggaatatgtcaagattgtccgtaacaacaatgaactgttgttgcaactaattacggacatactggatctctcgaaaattgaagccggtacgtttgattttacttacggagatgtaaatgtgaatttgctgtgcgagaatattgtccgttctatggaaatgaaagtgagcgaaggagtagcgttggtgttcgattctaatcttccgcaataccatctcattagcgaccgtaatcgtctgcatcaggtaatctctaactttgtaaacaatgcgattaagtttacttcgcagggaagtatccgtgtaggctatcagatgaagggggaagaactggaattctatgtgcaggatacgggaatagggattgataaggaacagcagttgcatatctttgaacgtttcgtcaaactcaactcttttgtgcccggcacgggattgggacttgctatctgccaaagtatcatagaacaacttggcgggcggataggagttgattccgaaccgggcaaaggctcacggttctggttcagactgccgggggtgattgtggcggaatgagtgtacaccctctaataatttttatccccgtctctattgtcacaataaatgcagactggagacggggataacttttttcttttcaattatattccgaacgagaatttatcaatagactgatatacgatgcttgctatacccagtccgataatgcccaacgtacaaagcgccagtccccatttggtacaacggtcgctgcggaaagtaggaatcggattatcggaaggagtgatatacattgctttcacaatcagcaggtagtaatacagtgagataactgtattcaccagtgcaatgaataccagcaagtggaaacctgcatcgaaggcagccatgaagataaagaacttcgagaagaatccggcaaatggcgggatacctgccaatgagaataaggacagggtcattaggagcgctatcttcggattcgtcttataaagtcctgcgtaatcttcgagtgtaaacttctggctgcgcagtgctacgatagtaataacggcaaatacaccaaggttggcggctgcatataccagtacgtaatataccaatgctgtcattccctgtgccgtgcctccgatgacgcccaacatgatatatccggcttgtgagatactggagaatgccatgaggcgtttcagattctgctggcggatagcgaatatgttggcaatcgtgatagaagcgatagttacccaataaagtacctcctgccaatcatcgatcatcggggcgaatactttaatcaggatagccaataacacgaatgctgccgagccttttgaaataacactcagataagctgtaaccgtgcttggagcgccttcgtaaacgtccgctgtccagaggtggaacggaacgagggacagtttgaacgccatacccgtaaagaagaatacgaatgccatgatttgcaggggatttccgtcgatgtgtgcgggaagatcatcgaagtacaatgttccggcagaaccgtaaatcattgacaggccgaacaacagcaacgcactggagaaaagtgccgtaaggatatacttggcaccggcttcggaagaattgtggcggtatttgtcgaaagcaatcagggcagccataggaatagaagctgtttccagtccgataaagaacatcaggaaatgtccggcggaaatcatgagatacataccaaacaaggtggagagtgtcaatacatagaattctccttgtttaaaggcggtgtcctcacgtttcatccattcgtgtgccatcagaaagacaatcaacgtacctatattcaggattgacttgacaaccgtatgcatggggacatagtgatacataccaccgaatacgtcggcggcagttcccggaatcaggttgatagctgtatggaccgccatcagaatgacaggtagcattgtgttcagtcgtgctttcccatcatttttgtgtgcgtccgggctcatgaagaggtcggccaaaaacagtagtagcaggacaactacgagcgacagctcttctcgcatatgtagaaattgtgaataatccatattgttaattacaaattactagttattaattacagattccggcttatgggattagttgtgagacaaccggcaatacactttcaccaatcatgtggcttatccagaaaggagccatacccaatcccgctacacaggcgatgaggcagataacggctacacgctcgtcccacgtcgcatcagtcagtgtgaggtgatgtttattggtacaggtaccgtatagaatcttacctaccagacgcaggatatagactgctgtaatcacaatcgaggagcaggcaatgatagtcaatgtacggtggaatacatcgttgttctggaatgaaccgacgaagattgtcatttcggcaatgaaaccactcaagcccggcagaccgagattggcaagaccggcaatcacataacatacgctcaggaacggcataatcttcatcaaaccggcaagctcgcgaacgtcacgtgtgtgtgtacgtccgtaaatcataccgataagggcgaagaacaaggctgtcattaatccgtgggaaagcatctggaggatagctcccgttgcggctgtctgattcagcatcaggatagcaaagagaaccaatccgcagtgggatacggaagaataggcgttgatgtatttcaaatccgtttgtacgcaagcggagaatgctccgtaaacaacagagataccggttaatatcaggaatatccatgaaagttcgttggctgcctccggcatgaggtacatggcgatacggaaacatccgtagcccccgagtttcatcaatacaccggcatggagcatggataccgccgtcggcgcggaagcgtgaccgtccggactccatgtgtggaacgggaaaagggcacccagtacaccaaaaccgaggaatgtcagtgggaaccagatgcattgctgtgcgaaaggtatattatgtaactgtgcgatttcgagaaggttcatcgtcgttgctcccgagccgaaatagattccgagaataccgatcagcaggaaggcggaaccacccatgagcatgagtgtcagtttcatggctgcgtattctttgcgtcccgaaccccatacaccaatcagcaagtacatcggaatcagtgcgatttcgtagaacatgaacatggtgaacaagtcgatggatataaagaatccgaacactcccatagagagcagggtgaaccaaaggaaatattctttggtcaaaggttgcagacgccatgaggcgaatgtcccggtgaatacgataatagcagacagtaacagcatggctactgagatcccatcgacacctaccgagtaggagatgtgaagcggagcataccatagggtatctgcgcgaaataacatttctgccgtgttgccggcactacgttctcccaagtacataaaggtcagtacgatggaggcaatcaaaagtgcagatgcgccggtaaccataacccctcggatggctttgattccttgggctgcccaaagaccggccagcattagtaaggggatgagtacgaatattgataagaaattcatatcgttctgtgctttataagattaatagtaggataagtgccagtgcaccacaaaggaacacatacgcatattgctgtacctgaccgctctgcaaaccacgaatttcgtcactagtggtattggtagcccatgccaggaagttaaagaatccgtccactacatgacggtcccaccatgcaataggagtagagatgcaacggaagataatcttatgtgtaatgaactggtatatatcatcaatatagaaacgattgtaggcagctttgtgcagacctttgaactgttttgccagagaatcggcaacaggctgtttggcattcttatacatccatgtagcgattgcaatagaaatgatagcaataacgacacttgtgatagctaccgacggatcgagatgaatagaataggattctccatttgaactgatgaaatgtccgaaaggaataaatccggctccacaagttaccgcagccaggaacatcagagggaatgtcatagctaacggactttcatgcgggtggcaaggtgccgcttccaagttcttatccgaatgggaacttgcccgggatggttcgctcccccagaagataccatagtagagacggaacatatagaaagcagtcattgcagcaattactgtcatcacccaacccataacagaactgtattggaagcaagcggccaaaatctcatcttttgagaagaaaccggagaacgggggaatacctgcaatggcaagacaagcaatcaggaatgtccagtgtgtgataggcatatatttacgtaatcctcccattgccgacatttcgttggagtgtaccgcatggataatgctacctgcaccgaggaataacagcgctttaaacatagcgtgtgtgaaaaggtggaacatggatgccatgtatcccaatccgccttcgtgcgggttcatggaagtacaaacccccaaagctaccatcataaaaccaatctgcgagatagtagagaaagcgagcacacgtttgatatccgattgtacacaagctacgcttgctgcatagaaagcagtaaatgcaccaacccaggctaccatatgcaaggtatccggtgcgtaagcaatgaaaagcgggaacatacgggctaccagataaacaccggcaaccaccattgtagccgcatgaatcaaagcgctgacaggagtcggaccttccattgcatccggcaaccagatatgtaatgggaacattgcactcttgccggcaccacccacaaacatcagtccgagagctaacggaagcatagaagcaccaccgctaatcaatgataccgtatccggagtgaaaccgaacgtcccgccataatatccgtaaatcaggataccgatcaggaaacctaagtcagcaaaacgagtgacaataaatgcttttttggaagcagagattgcagccggtttggtgtagtagaatccgattaataagtatgaacttacacctaccagctcccaaaagagatacatctggaagatatttgttgcaacgaccaatcccagcattgacattgtaaacagggacaggaaagcgtaataacgttggaaaccgacttcgcctttcatgtaaccgaaggagtagatatgtaccattagtgatacagtagatatgacaatcaacatcattacggatatgggatcgagtaggatacccaggtcgaagtgtaaagtttctgtaaaaggaagccacgtgaagttgtaaggtatcagtgtggcaaaagttccgtcttccagtcgcggagcggagaaatattggaaagccgtaacgtatgatagcactgctactgctcccagtaccagcgtaccgattgtacccgctgtccgatgagacatccatttacctccgattcccaataggagaaaggagaggaaaggaagaaggagtattagaattgttagttccatacagttttatttaattacttgttttattgttacttatactataatatcttgcggaatcatccgaatggaaaccgggaagtggcatcttgccaccgccttggtactaccattttagttcgtcaaggttgcggacttggatgcttcggatgttacggtagatgtttatcataatggctattgctattgcggtttcagcagccgaaatggcgatagagaatagtgcaaagaaatagccttccattcctcccggaaagagaaaacggttgaacacggcgaagttgatgtccgtggcgttcagcattagctccacagaaatcaggatagccagtgtattccggcgggtaaagaatccatagattcctgcaaacatcatgatagtagaaactaccagataatattccatgtgtatcataatggtatacttttaatttctaatctttaattttaattctccttatctcttacgtgcaatcataataccaccgataatacatgccagtaacaagatactgactgcttcgaaaggcaatatataaccgtatttgtcgctacttagcagggcatgaccgatagagtggatgtttatctcctgtggagccagattgttggtttgcaggaagttatgctttagcgtgataaacaggataattgctgcgccggcaaccattgtaaagagtcccgcgaagaacctgcttcgtttcagtttctctgcgcggtcaccctctccactggtcagcagaatggagaatacataaagaacgacgataccaccggcataaaccataatttggacagaacccaagaaagtgtaacccagcaggaaataaatgccggccgtaccgaaaagcacgaacaacagataagtagctgagcggacgatacgttgggtggtcaccgtcataatggacatagcaataataaatgctgccaaaaagtagaatactactgtttcaagtgttgatcccatatcttaaacttcttttttcttttctattactttactaccgtcgtgattcaacttcaatacaagcttcgtcctgtcgaataccgcatgttcgaagttctggtcgaacgtgatagcatcgtgcggacaagcattgacacaaagttgacagaacatacaagcacccaggtcatattcatatcttgccaggattttcttcttcttgccgtcctctgtctcgatggtttcgctgataaccttgatggtgtcattcggacaggccatttgacacaaaccgcaggctacacagcgatgttcgttattctcattatggggcatgttcagtgtgccgcggaaccggtcgaacattttcagctctttccggttttcgggatattgctcggttactttcttacgaaaatacaccttgatactggtcttcatacccgttgccagtgtactgatgccgtgcaccagaccacctaagtacgtatattttttatctttatattccataatctaatctgctagaaatgaaagccgaaggctacacaacatgccattattaataagtttaccatagaaataggaaccagatatttccattccagattcagaatctgatcaatacgcagacgggggaaagtccatttaatccacatcaatagaaataccacaaagaatgctttgccgaaaaaccagataaatccgggaatatagtccattacggcattaaatccgtccagccctacgatatgcaacggcatccaaccacccagaaaaatagtagcagcaacgctggctacaataaacagattcagatattccgccagatagaaaaaaccgaaacccatccccgaatattctgtatgatatccggcggtcaactcactttccgcttcgggaaggtcgaacggaccacggttacattcggcgtttccggcaatcagatagataatgaaggcaatcaccgcgggaatgtgtcctttgaagataaaccagccattagcttgtccctctacaatttcggagaattgcatggttcccataagcactaccatagtcatgatactcatacctacggaaagctcataactgataatctgtgcaccacttcgcatcgcaccaatcagcgagaatttattattactgccccagcctgcaagcagaataccgacaactccgatactggaagctgccaacaggaagaatacgcctacgttgaagttcagaatctccgcacctttattaaaaggaatacaagcgaaagtaaggaacgaagcgataatcaccataaacggagccagattgtagaggaaatggtcggcgcccttcggcatgaagatttccttagtcatcattttaagcacgtcgcagatcacctggatagaaccccatttaccgacacggttcggaccgagacggcattggaagaatccgcagactttgcgctccatgtaaatcaatatgatagccagtatggcatataatgcaacgatgcacacaccgatagccacacattctataaatacggctactccttccggcataatggagagaagcagctcatgtatccagtttgttactatactaaagtcgaacatataatttaaaatacttgatacttattacttgtttatctatcaatatccgggaccacataatccaacgttccgccaatagtaatcaagtcggcaatcttcgctccacggcagattgtgtcaattgcagcaacaagcggtagtcccgtggcacggtagtgcaggcgataaggcatcttgtcaccctggctttcgaggaaaacaccgaactcaccacggcttccttccacggcagcataataactaccttcgggaacacggatgatcggtttcattttctcttggtaggggccttcgggaatattgtcgattaattgttcgatgatgttcagactctccattatttcgtccatacgtaccaggtaacgggcgaaacagtcaccttccgtataaacaatttctttgaaatctactttgtcatatacaccatacggtatccgtttgcgcacgtcgcaagcccaacccgaagcacgtcctgtacctcctgtacagccgaaagagatagcatcttcacgactcagcactcctacacctttcatacggctttgggcaatgacattacctgtaaatatgtcgtggtattcgtgaatgattcctctcatatacgggataaattctttcacccgtttgacaaaattcgggtgaaggtcagcttgcacaccgccaatcgtgttgtaattcataatcaggcgtccgccgcaagtttcctcaaaaatatcgagaatcttttcacggtcacggaatccgtagaagaaagctgtcagcgctccgaggtccatggcaagggcggaaaagaacaataagtgggagtcgatacgttgtagctcatccataatcgtacggatatattgtacgcgttcgctaacttcgacacccattgctttctcaatacacatgcatagtgcatgacgattctgatgggcacccaggtaatcaagacggtctgtcagagccaatgtctgcggataagtaagactttcgttcattttctcgatgccccgatggatatagccacagtttgcatcaatcttacgaataatttcaccctccaaagaaacacggaagcgcatgacaccatgggttgctggatgttgaggaccaatgttgactacatattcttcttcgccgaagagtttggtttctttgtctttgattgtcccgtccgggttcagctctatttcccgggtcgtgtcaaacgtctcttcgtttgtcatacaaagcggattatctttctccgggtcattgtctttccgcatcggataacctatccagtcattgcgcagataaagacggcgcatatcaggatgaccgatgaaagtgataccataatagtcgaagacttcacgttcgtagaagtcggctatcttccatatatcgctgacagacgggatttccggtaattcacggttggttgtagctgtttttactgctatccgttcgcctgtgacagtagattccagatgatagactacgcctaacccacgaagtttttccggagtatctttctcatctgctgctccccagtccatgccggtgaggctctcgaggaagtccatctgtttttcattccgcaagcgcagcatctcgtcgtgtaatgctacgggggctataaattgtatttcttgcataaatcctttaaattaagaatgtaagattactcttcgttctttatataatccggtttcttctcttttctattcactccaccaaagaacttttctatttttaccttgcgttgcaactgcatcatgccataatagaaagcctcgggacgcggcggacatccggggatatatacatctaccggaagaatcttgtctactccgttcactacgtggtaagactttttgaaagggcctccgctgactgcgcatccccccacggccaccacatacttcgggtcgggcatttggtcatacagacgtttcaataccggagccattttattcgtgattgttccgcataccataatcatatcagcttgacgcggactggcacgtgctacttcgaacccgaagcgggccatgtcataacgagcggcacccaatgccataaattcgataccgcaacaactggttgcgaaagtaagcggccacagtgaattgctgcgtccccagttgatgaaatcgtcaaggactccgagagcgacatttgcccctccggcattaagctccctgaccaacttttccaatgactcattgtcaatgaactcctcataaggaattgattttatttttggctttttggttatttccattccaatgctcctttcctccaggcgtatgcaagacccagaactaaaataataaagaagaagagaatactaataagtccttgtggtcccatgtcacgcatcactactgcccacggaaacagaaaagctgtttctacatcgaacattaggaacagaatagcaaacaagtagtagcccacacggaactgcatccatgatttaccacgtgtcggtataccacattcgtatgcctcgaacttttgctcattgtatgagcggggggaaatagctcgcgaaagagctatcacaacaccgacaaaagcaagcgctgtcagtaaaacaacaactaaaaatgtaaaattcataattcaatagctgtttagattgaatattatagaaataaacaacaaacccttcacccaccggagaagaggttgattgcctgaaataaatcgaataaaaaatagtgccctggcttgtctaaatgacaatcttccttaaaccatatatataatgggtaacaggatcataaaggtagttgggagtgtgaagcgaaaatgagtaaggcggactttgcaatttataatgttcgcagaaataggcgatcagtaataacatgctcttgtctgtcggaacatgggcgacgtccgtatggctcatatcgcacgattgggtggagtatagattataaagacgctcaatcgcattatgaatcggatggtcttgggatacgtagcacttctcctgccgataagtcggggaggtaactttgcaaatatcttccattgttccattagtgacgcaatgaattagcaaagccagtaccaaaagtaatccgaattttaagctttgtttcatctttctcttataacggctgcaaatataggatttatatttatactttttgcaaactctaagtagcaaaaaaggtttttttagcactccaattgatctatgtcaatactcgtttagttctttttccagaaatcggaactgaagagcagtaataccgtaaataattccaaacgtccgaggagcataaggaaagaaagtagccattttgcagcgtcgggtaactcactccacgaataggccgggccacaggtaccgaggcccggtcccatattacccatacttgaaacaacggttccgattgactcgagaaatcctactccgaaacccaacataatgagtatgctgataatggcgataactgcatacagaaatgtgaatgccagtaccgttgattgaatcgaaggagagattacctgtttattaacccgtaccggtagtacggcgttaggatgcaggatatgtttgaactcattctttgctactttaaagagaatcaccatacgaatacatttgatacctcctgtcgtgctgcctgcacaagctcctatcaacataaccacaatcaggcacccccaaagaatggagggccaaagcatataatccgctgtggcaaaaccggtagaagtctgtaatgaaatcacttgaaacaatgatttacggaaagcttcctctactcccatatcacaggttcgatagagccagaaggcaatgaatattgtgaaaaaagatacacagataaaataaaacttcagctctgcgtcatggatgaatttcttgatctttccgttgaacatcaacaacaataaagtgaagttgatacctgaaagaaacatgaaaatggatattacgtaatctatataaggagagtggtaatattcaatgctagcttgtttggtcgagaatcctccggtactggtcgtcgtgaaagcatgacaaatactgtcaaatacactcatgccgccgaatacgagcaatacaatcagcgttcctgtcattccggcatagataccccatatccatttggcggtaacgccgatacggggatgtactttgtcatgagtaggaccgctggcttcggcagcgaatacctgaatgcctcccattccgaaaatcggcagaacggcaattgtgaaaaatacaattcccaaacctcctatccattgtgtcattgcccgccagaaaaggattccgtgtggcattgattcaatgttgttcataatggtagctcccgtactactgaatccggacatcgtttcgaaaaaagcgtccgtaatactcgggatatatccacctatataataaggtaacattccgaaaagcgagaatgcaatccaggcagtactgacaatgacatatccgtcacgacggttgagcgacttttccgcacctttgccaattgcaagcatcaatataccgacgcctgtggtgatagcggatgaaatcaggaaactctgcaaatcgttttctttgtagaaaagagagacagctccacaacatagcagcatagctgtttctatcagaagcaggaatcctatgatgcggtatatcatctttgagttaatcataaacaagctgcggttaatacttaaaacctaatacttaattaaagaatttctcaatctttttaatcatcatactcaggcagaacacaacgacatggtcgcccggttgtatcagcgtgtcaccggttacaagtactccttcaccattacgaatcatacctccgatagtggttcctttcggaaggccaaggtctttgataaaatgtttggtaatcttggcacctgccggcacggtgaattccgctacatctgcattggcaaaagtcaggcatttcacattggatacatccgcatccaacatcatttggtaaatatggctggcggcaatcatctttttgttaataaccgtaccgatgtcaaggctttcggccatgccgatataatcaatgttttctacttctgccaccgtcttttccacgcccatacgtttagcggcaagacaggcaagaatgttggtttcggaatttccggtcagggcgacgaaggcttctgtattcttcaacccttcttcaatcagaagatccatgtcacggccgtctccgttgataatcatagtcttgtcatccaataactcggtcaggcggttgcaacggttgatatcgttatctacgattttcacctgcatatagtccggtacgtattgtgcagtacggacagcaatgcggcttccgcccataatcatcacattacgcacatcggcgtaatcttctttaccggcaattttccggatataagggatatatttgcgggtggtcgtaaaataaacaatatcatgcaatttgataacgtcatctccacgcgggataattgtttctgttccacgcttaatggctaccacatggtaggggatattcgggccacctaattcatagagtggaatattcagaatctccgctttttcacgcatcttggtacctattaagatcagagcacctccacagaactcccaccattggcgtacccagctcatgcgcatggaagatacgatttctttagcggcaagcatttccggataaatcagggagtctacgcccagtttctgaaagaattctttatttttgggcagaagatattcgtagttgtcgatgcgggcaacggtctttttggctcccaagttggtagccagcatacaagcggtcatgttcctgctctcgtccggggtgacggcaatgaacaagtcggcttctttcacacctacttcctttaaaccggaaatagaagaaggggaggcggtgaccgtcagcaaatcgaagttggaactaagtgcggttagtttttcctcgtcatcgtccattaggatgatatcctgtttttcccgggacaataatttagccaggtgggtgcctacgttaccggcccctgcaataataatcttcattttcagttggttaattctttaactccactcatgcttagctgaagtgcgcattgctttaaaagttctttagtgatgctgtcttcatccattccgcagagttggtatagttgtgctattgtgccatgttgaacgaatttatccgggattccgatacgtttcacggtcggagtatattcatggtcggccataaattcgagtacggcacttcccattcctccctgaatcactccatcttctatggtaacgatgtggcggaacttccggcctacctcgtgcagcagtccttcatccagtggtttgaggaatcttaaatcgtaatgtgcaatgcttttgcccgattcggtttcggcacgggcaatggcagtagccgctttatttccgataggacctatgctgataactgcgaggtctttaccgtccttcaatttccgtcccttacctacgggaatttcttcgagcggacatttccagtcgactaatactccgcgacctctggggtaacgtatggcaaacggacctttgtcaggcagttgggctgtgtacatcagacggcgtaattcatgttcatccataggcgatgcaatcgtcaggttaggtatcggacgcagataagccatgtcaaaaactccgtgatgagtaggcccgtcttcgcctaccagtccggcacggtcgagacaaaagacaacaggtaagttctggatagctacatcgtggatgatattatcataagcccgctgcatgaacgaagaatagatgttgcagaaaggttgcaaaccgtcttttgccatacctccggagaaggtgacggcgtgtccttcggcaattcctacatcgaaagcccgtttaggcattttagacatcagtatgttcatcgaacagccactgggcatggccggggtaacgcctacaattttaggattggcttcggccagttccacaagcgtatttccgaaaacatcctgaaagagaggaggcattccttccgtattggcaataaaacgctcaccggtgacaggatcgaacttgccgggcgcatgccattcggtagcgtgcatctctgccggggcgaatccttttccttttatggtatgtaagtgcaggattttaggtccttgcaggtcttttatatctcgtaatatgcgggcgaggttcttcacatcgtgtccgtcgataggaccgaagtagcggatgttcattccctcgaagatgttttgttgttgtgcagccattgatttcaggctgttgccgaaacgtataagggctttgcggcgttcttcgtttaaaataccgagtttgaacagcattcgtgacaacttgaaacgtagctggttgtagcggttggaagttgtcatgttgaaaagatactgtttcataccgccaacactacggtcgattgccatgtcgttatcattcaagataatgagcaggttgttcgaggtggttgatgaattgttcagtccctcgaaagccagtccgccactcatcgaaccatcaccgatgacagctatgacatgacggttggaatctccgttctgagcagcggcaactgccatgccgagagcagcagaaatagaattggatgcatgtccgcaggtgaaagtatcgtattcactctcctccggtgaaggaaaaggacggattcctcccaacttccggttggtggagaaagcttcccgtcgtcccgtaagaatcttgtgtccgtatgcctgatgacccacatcccacacaatacggtcataaggcgtattgtagacgtagtgtaaggctacggtcaattccactgtccccaaactcgcagcgaaatgtcccggattgcagcatagctctttaataatgtcttgcctcagttcattgcatacttccggtagttgttctacgtttagtttccgtagatcttcggggtaatcaatagtgtttagcaagttatatatcggttcattattcatgattctaggaaatttagtgcaaaaatacgaaaagaatgtggaacctgaaatggaatacacatctttattgtacttttgcttcgtgaaaaggaattaataaggagaaaaaatatatggattttcgaacgaaggttgaactgcccgcaagcttgccgcctgttactcatgccggacaaatacttctgctgggctcctgttttgcagaaaacatgggtaggcaactggcggaaaacaaattcagggtagatgtgaatccttttggtattctctacaatcccttttctgtttcaacagccttagttgaaatattaaaagggaaggtgtatcaggaggaagatttatttgcttataaggagtgttggcatagcccgatgcatcatggctcattctccgcagctacggcgggcgaggtcatccggaatataaatcatcgtttgcagcaggcccataagacggttcatcaactggattggttgatgttgactttcggcaccgcctacgtctatgaacagaaagaaacggggagggtagtgtccaactgccacaagctgccggaaagcaattttaaccgccggctcctgtcagtcgacgagattgtgaacgaatacacttcattgattgccggtatgacggcacgtaatccgaatctgaaggttctctttacagtcagcccgatccggcatattcgtgacggaatgcatgccaatcaacttagtaaatcgaccctgttgcttacaatcgaccgcttgcagcaattgtttccgaagcaggttttctactttcctgcttacgagatagtacttgacgaattgcgcgattaccggttttatgccgatgatatgttgcatccgtctccattggccgtgaactacctgtggaaatgcttttctgattcctttttttctgctgaaacaaagcaggttatgacagaagtggaggatatccgcaaagatatggcgcataaaccctttcatcccgaatcggaagcgtatcaacgctttttaggacaaatagtgttaaaaatagaacgacttatcggaaaatacccgtacttagattttcaaaaagaaacagaactatgtcatatacgattgaatccatagccgaatgtatcggtgcccgccgtgtgggcgaatgcgaagcgacgattgattggctactgacagacagccgctctcttagtttcccggaagaaactcttttctttgccctgactacgaaacgtaacagtggagcccgctatatccccgatttatatgaccggggagtgcgtaactttgtggttactgaagaagactttgagaaatttaagaatggagaactaggaaagctctccaccctcaatttcctcatcgttgccaatccgttaaaggctttgcagaagctggctgaaatacatcgggaggagtttaaaattccgattatcggtataacagggagcaatggaaagacgattgtgaaagagtggttacaccagttactgagtcccgaccgtcgtattgtccgttcgccgcgtagctataattcacagattggtgtacctttatcggtctggcaactgaatgaagaagcagaattgggcatattcgaagccggtatttctgaaatgggagagatgaatgctttgaagcggatgataaagccgactattggcattctgactaatattggcggtgctcatcaggaaaacttcttctcattacaggagaagtgcatggagaaactgactctttttaaagattgtgatgtcgtaatttataacggagataacgagcttatcagcaattgtgtagcaaagtcgatgttgacagctcgtgaaatagcatggagccgtaaggatattgaacgtccgttatatattagccgggtgactaagaaagaagatcatactgttatttcctaccgttatctggatatggataatactttctgcatcccgtttattgatgacgcttccatagagaatgtactgaactgtctggcagcctgcctctatttaatgacccccgccgatcagataacagaacgtatggcacgtcttgaaccgattgccatgcgtttggaagtaaaagaaggaaagaacaattgtgtattgattaatgatagttataactcggacttggcttcattggatatcgctcttgattttttggtacgtcgttcggagaagaaaggattgaaacgtacattaatcttgtcggatattttagaaacaggacaaagtaccgctacactttatcgtcgtgtggcacagttggtacggagtcgtggaatagacaaactgattggcgtaggagcagagatttcttcctgtaccgctcgttttgacgatgcgttggaacgttatttcttcccgaatacagaagctcttctggcttcgaatctgctgaaatcacttcattcggaagtaattctgattaaaggttcccgtgtgttcaactttgatctgctgtccgaagaactggaactgaaagtgcatgaaacgattctggaagtaaatctcggtgcaatggtggagaacctgaatcattatcgtgcgatgcttcgtcatcccgaaacgaaagtgatctgcatggtaaaggcttccgcttatggagccggttcgtatgaaatagccaagacattacaggaacatcatgtcgattatctggctgtagccgtagccgatgaaggttccgaacttcgtaaagcaggtattacttcttctatcatcataatggaccctgagctcacagcattcaagactatgttcgactataaactggagccggaagtttataatttccacctgctcgatgctttgattaaagcagccgagaaagaaggaatcaccaacttcccgattcatgtaaaattggatacgggtatgcatcggctgggttttggcattgatgagattcccttgctgattcgtcgcttgaaagctcagaacgctgtgattgcccgttcggtgttctctcattttgtaggtagtgattcgcctcaattcgattcttttacacgtcagcagatagaattatttgagaaaggttcgcaggagttgcaagccgctttctcacataagattctgcgtcatatctgtaatacggcaggaatcgaacgtttccccggtgcacagtttgatatggtacgtttgggaatcggactttatggagtgagtccgatagataattcgattatacacaatgtaagtactctcaagacaacgattcttcagattcgggacgtgcctgcagaagatacggtaggatatagccgaaagggacatttggaacgtccttcacgcattgctgctattcctatcggctatgcggacggattaaaccgccatttgggacgtggaaacgcttactgtctggtgaatggaaaaaaagcgccttatgtcggcaatatctgtatggatgtttgtatgattgatgtaacggacatcgactgccgtgagggtgaccaggcgattatcttcggtgatgatcttccgattactgtcctttctgataaactggatacgattccttacgaagtgttgactagtatatccactcgggtaaagcgggtttattatcaggattagttcataacagagcaacactgagtttcacagggtgggcaaaataataaaaaactccgtggaactctgtgctactctgtggcgaaaatgttatatttgcaccaactagtagaaacctcttatcaaataaacttatgacaaacttattattgttaggctttttgcccagcggttccgaatggattattattgctttggttattcttcttcttttcggtggaaagaaaattcctgaactgatgcgtggcttgggtaaaggggtcaagagcttcaaggacggagtaaatgaagcgaaagatgaaataaataaggcgaaagacgaaattgacaaaccggcagattcagctaagtaaagaagaaagttcgaatggcagaaatgaccttttgggatcatttggatgaactgcgtaaggtactctttcgggtgattgggatttggttcgtgttggcgataggctattttatagctatgccctatcttttcgatcatgtgatactggcaccttgccacaatgatttcatattctacgatttattacgatacatcggacagaaattcgatctgactgatgatttttttacgcaagattttcatgtgaagttagtcaatattaacttggctgctcctttttttatccatctgtcaacggcttttatgttgtcggtagtgactgccataccctatctcttttttgaaatatggcgtttcattagtcctgccctttatcccaatgaacgtaaaggagtacggaaagccctgacaataggtacattcatgttctttatcggtgttttgttggggtattttatggtctacccgttgacacttcgcttcctttctacttaccaattaagttcagaagtagaaaacattctctcgctcaattcatacattgacaattttatgatgttgattctctgtatgggacttgcttttgaacttccgctggtgacttggttactctctttgttgggaatagtcaacaagtctttcttgcggaaatatcgtcgtcacgctgttgttgtcatcgtgatagccgccgctataatcactcctacgggcgatccctttacgttgagtgtggtagctattcctctttatctgttgtatgaaatgagtattttgatgataaaagacaagaaggaagaagatataacagaagaagtttaaacatcgtcgggtatttgaaggcactcatttgcataagaattaagatttatcacgtacctttgttttatggaagcaaatgaaggaatagaatcttatgaactactgctggctgtttgccgggagaaaggtgtggaattggttgttggctataaacaaatgcgtgatttgttggaacgtatttgtcgttcggagatgcagaatgagagtctgcaaatgaccgacctttccgccagaatcagttttgtaggtgccaaaaccggacttacttatgcagagcagaatcgtttgcatacattccgtctgacttctaatcgggttttgaatcaccagcttgttcctacccgggagaatcttttgcgagacgtcaagacattggcttttcttatccgtaaattgtccggtgaagatgttcctgttgaattataccgtttgctaccccgtaccgatgcaacttatctggttgcacctcctgcccttgaacgtgtgcaacggatgcgcgtctgctttcagtatgccgatgaacaatatttatatgtaactccgttggatgaagtatcggagaaaccttatttggttcgctataacattcctcagataaacgaagaatttgctgaaacctgccggctgctatggcaatatgcccaaataaatctattagacgttgcggtagatgaagcgggcgtattgaccccttcatttatcgttctcgaaccggattacctgcttgacatcagttcccttgccgaatgtttccgcgactacgggcatcatccggcaaactatgttctttcccgccttcagccgattgagaatgcacgccctttgttgctgggaaacattgccaacctttttctggatgaatggattcatgcacaggaagaagaaattgattaccgtgcgtgtatgcagaaagctttccggcgctatcctatcgaattggcagcctgtcccgatttgcgtgacaaggaaaaggaacgccggttcttcgatgactgtaaacttcactttgagcatatccgtgaaacggtaaacgatactttccatgctgccggatacgaactggataagacggatgctgtgctcgaaccgtcttatatttgcgaagcactcggactgcaagggcgtctcgactatatgcaacgggatatgtcctcctttatcgaaatgaaatcgggtaaggctgacgaatatgctatccgtggcaaagtggagccgaaagagaataataaagtgcaaatgttgctttatcaggcagtcctgcaatattctatgggaatggaccaccggaaagtgaaagcttatctgctatacacccgctatccgttgctttatccttcccgtccttcctgggcactggtgcgtcgggtgatcgacttgcgcaaccgcattgttgctgatgaatatggaattcagttacggaatagtctggagtataccgcgcagaaactagaaggcatcaattccttcaccttgaacgagcgaggtttgaaagggcatttttgggaaacctacctgcgtccttccattgacaatttccagtcgaaattgaaagcactctctcctttggagaaaaaatatttctatgcaatatataactttataacaaaagaactttatacctccaaatccggagatgtggattatgagggacgcaccggagccgcttccttgtggctttccactttggcggagaaatgcgaagcaggagagattctttatgatttgagaattaaggagaatcatgcagccgatgaacataaagccggtcttacgttggccttccctccggaagagaaggtgggaggagaaagaacttttctccctaatttccgtcaaggcgatgccataattctttacgaacggaactctgatacagataatgttaccaataaaatggtattcaaagggaatattgaatatctgacggatcatgaagtcggaatccgtttacgtgctacacagcaaaatccttccgtacttcctgcccggagtctttatgcgatagagcacgatacgatggataccactttccgttcgatgtatcaaggattatatgcttatctgtctgctacgcaggaacggcgcgatttattgctctctcagcgcccgccggagtttgacgaatcattggatatactcatagctcaagcggaagacgacttcacccgcgttgcattgaaagcgaaagctgcaaaagattacttcctgttagtcggtcctccggggacgggtaagacctcctgtgccctgaagaaaatggtggagactttccatgccgataaagactcacaaattcttctactttcgtataccaatcgtgctgttgatgaaatatgcaagtcgcttgcttcgattcgtcctgctgtcgactttatccgtgtagggagcgaattatcctgtgatgaagcatatcgcggacatctgatcgaaaacgagttggcatcctgtacacgccgtgccgatgtttatgaacgtatacgtaattgccgtatcatggtaggaactgtggccgccatttcgggaaagcccgaactctttcggttgaagcactttgatgtagctatcgtcgatgaggctactcagatattggaaccgcaattgttaggtattctttgtgcacacggcgaaggcgacaggaatgcgatagataagtttatcctgatcggtgatcataaacaacttcctgccgttgtcctgcaaaaagcggagcaatctgctatctatgacgaaacattgttggctatcgggctgactaacctgaaagactctttgtttgaacgtctttatcggaattgccctgccgttcaccgttcacacgatatgctctgtcgtcagggacgtatgcatcccaaagtcgccttgtttgccaaccgggctttctatggcggacatctgataccggtaggcctgccgcatcagactgagtcatccgaacacatttcccgtcttgctttttatccttcacagccggagaaggcgggagggtcggccaagataaattattccgaagcccgtattgtcgcaggtctggcagctcaaatctatgaatctcaccggacagactttgacgattcccgtactttgggagttatcaccccttatcgcagtcagatagcacttataaaaaaagaaatagaagcgttaggtatcccggcgctcaatcggatattggttgatactgtcgaacgttttcaaggtagcgagcgggatgtgattatttattcctgttgtattaatagttattatcagttaaaatttgtgtcgaatttaacagaagagaatggagtgctgatagaccggaaattgaacgtagcccttactcgtgcaaggaaacagatgtttgtgacaggagtcccgaaatacctgaaatccaacccgctttatgaaagtttattaaatttaatagagactcaggggtaattcgctaatttttgcagatgttagtttttattctctctttatgcaattcattaacacctcaataatgaacaaacgcctatatttgcaacacgtttttttcatagagatttagatttaaggttagaagaattgtggaagtcgtgagacttccctttttttcatcttaacgattactatcctccattattagaatgcttctttttcattttaaaagcaggaagtaatgtagaataagtaatcctaaaaagccttcttcgtgagaagaggcttttttgttttactagaatattttgttttacgaaaaacaggaaggtattattaattggataccttcctgtttcattttatatcagatgatagattaatccaatacgataggtttgtacttcggtactaatgccttcataatcacccagcctaccaggtaagctaccgcacagatacagaacataatgaaatatccggcaggcttgccttcgaatcccataaatgtcatgtgcgtttcatcggcatgaacaaacagcagacctgcaccgaactgcatcaacatggaacccacaccaccggccatgccaccgatacctgtaatacttgcaatagcggttttcggaaacatatcacctacagtagagaagatgttagccgaccaagattggtgggcagcaccgccgataccgataaggataaccgggaaccacggagagaatgtacccaatggctgtgccagcaataccaccaacgggaagaaagcaaaaatcaacattgccttcatacgggcagcataaggattcatacctgtcttattaataaagatagtcgggagtttaccgccatagatagacaacattgttacggcataaagggtgaaaatcaaagccattcccagtccatcggaagtcttgatgtcaaattgggtattcaggtaagacggagtccagaacaagaagaaccaccacacaccgtcggtcataaacttgccggcagcgaaagcccatgtctgcttgtaagtgaaacattgaaggaaagacatcttcttttcttctttcacctcttcaatcacaggggcggcgccttcttcatatttatcctgttcgatataatcaagttcggctttgttgacgtgtttactctttgaaggagcatcatacatgaatacccacatacccatccagacaaaaccaagcgcaccgattacgataaatgccatttcccagccccatgcttttgcaatcaacggaatggaaacgggagcgatcaaggcaccgatagaggcaccggcgttaaagatagaagtagcgtaagcgcggtcctttttagggaagtattcagccgttactttgatagcagccgggaagttgcccgcttcaccgagtgcaaggatacagcgagcggcaaggaagcagtacatactgacggtagccagtacaacaaccacgtcaccggtagcagccattagttcggctgcgctgtgcaaacctacatattgttcggtcacaattccgcagagtgcgtgcatacaagcacctgccgaccatacaccgattgcccagagatacccttttttggtgcccatccagtcgatgaagcgaccggcaaacagcatacatattgcatatacaatagagaatacggaagtgatagtaccgtagtgtacttcattccaatggaattccggtttgataaattcgtcccaggtcagcgatagcacctggcggtcgagataattaactgttgttgcaaaaaatagcatagcacagatagtccatctgtagtttgtcattttttcgcctgttttttgaaatgcattcatgataatggatttaatagattttgatttgctgacaaaggtcggtatttcgaatgaaagttatttgtaataattggtcaaaatcatgtataattcgttgcattataggatgattttgttgcatagtatatgtcaggtgttacatttgtattctttgggagaagaatatgataaatccggaaaacttcattctttccttatacagaggaatgaatgaagtttctcggattgtttatatggttgcagagatgcgcaatgattagcgcatttctgtatatttaatcttatccatatctccgtagtcgaggttttcaccagccatgccccagatgaacatatagttgcttgttccggcagcagcgtggatagaccattccggtgacatgatagcctgttcgttctgcatccatacgatgcgttcttcctgaggctcgcccatgaagtggcagatagagttgccggtcggtacattgaagtagaagtatgcctcgatgcggcggctgtgagtatgtgcaggcatcgtgttccatacgctacccggtttcagttccgtcaatcccatttgcagttggcaaggaccttcttcaagtacattgtttacaatcaactggttgataacgcggtcgttgctttcttccaattttccggcagggaaagagttggctttcagagagcctttacgtccgtcaatcgtaattaactgcgttttgtattctttgtgagcagtagcagagttgatgtagaacttggcaggattgcttgagtctttgctcttgaaagtcactttctgcttgcctctaccaacgtacagtgcatctttgaacttcaatgtatattctttgccgtctacggtcacgattccttcgtcacctacgttgataacacctagttcgcggcgctcaaggaaaaacttagctttcagcggatcgattgtttccagtaccagttcttttgttgtaggcacggcaccaccgaagataaaacggtcgtacatagaataagtaacgttgatttcgttcggaaccattactttttccataaggaagctactacgcaggcggtttgtatcatacgttttcacgtcttgcggattgcaagccacttgcatcttgtaattcacctgggcagaagcagacatcgctgcgatacccaacatcattgcaattgctaattttttcatctttcgaatctttatttgaattatatattatgtactacttgttgttcaatgcttcttttgcatcatttctcgtcatgcggatacggttgtagatagccattccgagtgcgagtaccacgaggattgccgggccgataatcttcaggctgtaagtcaggtggaagataccccagcagaaaagactggaagcaaagtcgagtgcgccgccttcaaagcctgcggggatattcactgtcgggtcgcccgtagcagcatatacgtcttttgcggccagggtgaagaaacctgccagttccgttacgaaatacaaacctacgattaatgctaccagtccgataataaacgatttcactacattacctttcgtgataggcagaatcatcgggaacaggtagaacatacccgccagagatgccagcggaaggaaccggttgcccggcagaatgactgcaaggaatatagttacgggaatcaaaagcagggataccaccagtgtcgtcgggtgtccgataaccaaagcggggctcataccgatactcagtccggcactgttcttatatttttttgcgatcagttcgcgagtagcgtcggagatcggtttcagaccttcgataaagaggctggtgatacgtggaatcaactccattaccgcgcccattttgatacccagacccaatatgctcggaatgctgtctaccacttctttccagcttccgcaacccagcgcaccgataccgcaaccaattacgatacccagaaacaagggttcacccattaagccgaatttctttttcaatccttcagagtcgatattcagcttgtcgaatcccggaattttatccaatagtttgttgattacgatagcaaacggaacgaaactttggcagaaaggttgcgggatagagattccgtccattttatcatagaacttctgaaaagcaggagcggtaaggtctgccattaccagcgtgatgatgtagcagatgatagctgcaaagaatccccaatagatattgtcggaagcaaagtatacgatagcgccgataaatgcaaagtgccagtagttccaaaggtcgatattgacggtacgggttgttttagtcagcaacattaataagttaattcccagacaaacagggatgatgaaagcaccgactgaggtattgtaagctaccgccgcagcagaaggccaccccatgtcgaaaattcctaattccaatccgtagatttcaaccattttacttaatgccggacccagactgctggttagcaatgccgtcactactgataaaccaacgaaaccgacaccaaccaacaaaccgctcttgagcgctttgggaagtttaataccgatacatactcctaaaatcgtgaaaatgatcggcatcattactgccgctccaagaccgataatgtacttaaatacttcttccattctgttctatttttctctgttttaatgataatttactgtgtttccccagagggcattagttttaaaccgtgccaaaagtaagaccttttttgctttcttccaaaacgaaactcttaatttatcagatattgcatcaaaaatggacatttttgacgtttgcgtgcacaaaaatagtcgtttccgtacacgaaaaacaaaaaatgcacctagttgattaaaaattcctatccggtttggaagaaatacactactttcgtagcgtgaaaaacgagtatgttgaatccttaaaataacaaaccatgagacgaacccttgcatctgttctttttatattgcttacactggctgcaatcattctcccgatgtcggcgcagcaggtagataagaaactcccctggtctgtacgaatgactcaatcagaaatgatccgttggccggaatcctggcaactcgactttcagcccaagctaaagtgggattattgtcacggtcttgaattgggagccatgcttgatgtctatgatacgtatggtgacaagaaaatccgcgactacgccattgcatacgcagatacaatggtgcacgccgacggaacgattactgcctataaattaaccgattacagtctggatcgcatcaattccgggaaaattcttttccgtatttatgagcaaaccaaagatccgaaatacaagaaagcgctcgatctgctttacagccagtttgaaggacagccccgtaatgatgatggcggtttctggcacaagaaaatttatccgcatcagatgtggctggacggactttacatgggagctcctttttatgcagaatatgcattccgcaacaaccttccgaaagactatgcggatataattaaccagtttgtcacttgcgcccgccatacttacgacccgaaaaacggactttaccgtcatgcgtgtgatgtcagtcgcaccgaacgttgggcggatccggtcaccgggcagtcgaagcactgctggggacgtgctatggggtggtatgccatggcgttggtagatgcgctggattttattccgaagcacgaaacagggagggattcgctgcttgctattctgaataatattgctgtgcaggtaaagaaactgcaagacccgaaaaccggaggctggtatcaggtcatggatagaagcggagatcaaggaaattatgtcgaatcgtcctgttccgccatgtttatctactccttgtttaaggctgtccgcaagggatatattgataaatcttatctggatgtagcgttgaagggctataaaggtttccttgataattttatcgaagtggataggaacggcctggtaaccataaccaaggcttgtgcagtagccgggttgggaggaaaagtatatcgttccggtgattacgactattatattaatgaaacaatccgtaataacgaccccaaagttgtggggccatttatcatggctagcttggaatatgaacgtttacaaaagtaatttatgccgatgaaagggactatttttaaagggatattgctaattctctttcttggtgtaggagagacggcagtttattcgcaacaacagcagcgcaaagatacgttggtcgtcacacgcgacgggacaggagattaccgcaatattcaggaagcagtggaagcggtccgcgcttttatggattacacggtgacaatttatatcaagaacggcacgtataaagagaagctggtaattccctcttgggtcaagaacgttcagttggtaggcgaaagcgccgaaaatacgattatcacctacgacgaccatgccaatattaacaaaatgggaacattccgtacgtacaccgtcaaggtatcgggcaacgatattactttcaaggacttaacgattgaaaataatgcggctcctttgggacaggccgtggcacttcataccgagggtgaccggctgatgttcataaactgccgttttctgggaaatcaggacactatctataccggttcggaaggggcacggctcttatttaccaactgttacatcgaaggtactaccgactttatcttcggaccttccactgcacttttcgaatactgtgagctgcatagcaaacgtgattcgtatatcactgccgcttctactcctcaaaatatagaatttggctatgtcttcaagaattgcaagttgactgctgctccgggagtgaaaaaggtctatctgggccgtccgtggcgtccgtatgcagcgacagcttttattaactgtgagtttggaaaccatatccgtcccgaaggttggcacaactggaagaatccagagaatgaaaaaacagcccgttatgccgaatttggcaatacgggcgaaggcgcaaagactgaaggacgtgtggcatgggccgaacagcttacaaagaaagatgtattgaagtatacaccggagaatatctttaaagaagatagcaattggtatccttataaataggaacagataagatgtccgatcggttggggagcttgaagcttttgtttcctaagctcgaaatcctggttccgaggcgggaaactgtagtttctctatgtgggaactggagtttctgcgtgtggaaactagagtttctaacgcttgaaactaaagtttcagagccttgaaactgaacttgttcaggtgcaagacaaaatgttgcaggtggcagataaaacgaagaagaactaaaagagcgtgaagaatatgaaaacactaggggctaaaatgataggattactggtagcagcctttatcctctgttccgcatttcgtgcggataaaccggtcgtaactgtctttatgataggagattctactatggccaataagaaactggacggaggaaatcccgaacgtggctggggaatggtacttcccggattcttctccgagaatatcaggatagataatcatgctgccaatggtcgaagttccagaagttttatcagtgaaggccgctgggaaaaagtcatttctaaggtgaaaaagggagattatgtctttatccagttcgggcacaatgatgaaaaagctgatcccacccgccataccgatcccggaaccaccttcgatgatcatctccgtcgctacgtgaacgagactcgagccaaagggggaatccccgtattgttcaattccattgtccgccgtaactttgttcagcctaaggacacttccatttcaaaagatgtccgccggacaccgggggaaagtgaaccgcccaaagaaggaaccgttttattcgatactcacggagcttatctggattctccgcgtaatgtggcgaaagaactcagagttgcatttattgatatgaataagataacacacgacttggtggaaggactcggcccggtagagtcaaagaaactgttcatgttcgtcgaaccggatcaggttcccgccttcccgaaaggccgcgaagacaatactcatctgaatgtgtatggtgcacgtgtgattgccgggttggcagtagaggcaatcggcaaagcagttccggaactggcaccatatatccgccactatgattacgtggtggcacaagacggaagcggtgatttcttcaccgttcaggaagcgattaatgcggttcccgatttccgtaagaacatccgcaccacgattctgatacgtaaaggtacttataaagaaaagattatcatccccgaaagcaagattaatgtctccttgatcggagaagaaggcgcgacgttgaccaatgacgacttcgccaacaagaaaaatgtatttggcgagaacatgggaacttccggttcatcgagctgctatatttatgcaccggacttttatgcagagaatatcacttttgagaactccgccggtcccgtcgggcaggcagttgcctgctttgtctccgccgaccgtgccttcttcaagaactgccgctttttaggttttcaggataccctctatacttacggcaagcaaagtcgtcaatattatgaggactgttacatcgaaggaacagttgatttcattttcggttggtctacggctgtctttaaccgttgccacattcacagcaaacgggacggctatgtgaccgcaccttctaccgaccaagggaaaaagtatggctacgtcttctatgattgtaagctcaccgcatcacctgaagcgaagaaagtatatctctcccgtccctggcgtccgtatgcacaagccgtatttgtccgttgcgaactgggacagcacgtccttcccgaaggctggaacaactgggggaagaaggaaaacgagaaaactgctttttatgcagagtatgacagtcgtggcgaaggtgccaatccgaaggcacgtgccgctttctcccatcagttgaaaactcttaaaggatatgagatagaaacagtgctggccggtgatgacgggtggaatccggtaaaaaacggaaatcatctgttagatgtaaaacgttgaactcttatgcctgaaactgaaaacttgttttattgaataacctgtttctgctaaatagctggtaaagatagtattaaaatcctgttatttttctatctttacgccacagaaccgagtgatatgatgaagaaaactttactttcagtgattctcctgctagctattgtgttcacggcacatacacagcagcattgctttttcacccattactctactgaggacggactgtcgcaaaatacagtcatgagcattcttcaggaccataaagacaatctttggtttgccacctgggatggtattaaccgttttaatgggtacactttcaaaacttacaaggcacgacagggaaattacatcagtctgaccaataatcgggcggaccgtatgtatgaagaccgttacggttttctctggctgttgacctatgacaaccgcgttcatcgctttgatccgaaaacggaaactttcgagcaagtgcccgcagccggtgaggaggggagtgcattcaatgtacataccattgaagtaatgccgaacggaactgtctggctgctgactgaaaacgacggtgcgattcgcattctgactcatcccgacgagaatcatcggctgacatgggatatttattccaataagacggaattgtttccctctttacatgtgtttaaagtacatcaggacaaagccggtaatgactggctgctgacagacaacgggttgggcatgattcgtccaggagacaaagaacctgtttcttattttacggaaaccaaaggaaagcttagcgaaatgaaccaggctttctatgccgtgcaggaacgtgatgaggatatttgctttgcttcggaccacggacgtgtctgggtatatcagaaaagaagcggagaatttgtattgctcgaacttccgaccaaagggcggatcacctccattcatacggttgcaccggatatgtcggtcatcactacggattcggacggtttctttacctgtaatctgaaaacgaaagcatcggtacactattcatttctgacttgcaaggagttacctgccaaacccattctatcggcttatgtagaccgttcttcggaagtctggttcgaacaggaagaaccgggtgtggtagctcatttcaatccgtttaccggagtagtgacgcgtgagcagattcttattgaatatagtaatcctgaacgttcacgtcctgcttttcatatccatgaggatgtgaacggctatctgtgggtacacccgtatggaggtggtttctcatattttgatcctcagaagaagcggctggttcctttttataacggactgggcagccgtgactggcgtttctccaataagattcactcggctttctccgacaaacaagggaatttgtggatgtgtacccattccaagggattggaaaaggtgacttaccgtaatgttcctttttcgatgatgactcccgtaccgcaggaatatgaatcactgcataatgagatacgtgccctctgtgaagacaaacaggggaatctctgggtcggtgtgaaggacggtatacttcgtatatatgacgccgatcgaacttataagggatatctgacggaaaacggcataatttccactgtcggcactcccgtgaagggaacagcctattttatcattcaggattcgaaaggagtgatctggattgcgacaaaaggtgacgggctgatccgtgccgaggcaacctctccttcgggaatgtcgtacaagctgacccgttatcttcaccaagaggatgatatgtatagcttgagcgataacaatgtgtattgtgtgtacgaagatcataacgggagaatctgggcggctacctttgccggtggtatcaattatctcacggagaatgaggacggaaaggttttgtttatcaatcaccgtaaccatttgaaaggttatcctattgatccctgctacaaggctcgttttatcacttccgacaataacggccgtttgtgggtgggaacgacgacgggtgccgtagcctttgacgagaatttcgagaaaccggaagatgtacagttctatcacttctcccgtatgccgaacgatacacaaagtttgagtaacaatgatgtgcactggattatccccactacggataaggaactttatctggctacctttggtggcggactcaacaaactgatctctatcagtgaagacggacatggggcgtttaagtcttactcggtgcaggacgggcttccttcggatgtactgctttccattcgcgaggacgataaacagaacttatggattagtacggagaatggaatctgtaaattcatcccctccgaagaacggtttgaaagttatgatgagcgtagtataactttcccggtacgttttagtgaggcggcttccacattgaccgcgaaaggcaatatgctgttcggtgccagtggaggggtttttatcttcaacccggattctatccgtaagagtagttatgtgcctccgatcgtgttttctaaattaacagtagccaatgaggatgttgtgcccggggaacaatcgttgttgcaggcagatattgatgatacggagcagctggtgctttcgcacgatgagaatatcttctctgtacagtttgcagcgctcgattataccaatccgcagaatgtgcagtatgcctacattttggacggatttgaaaaacaatggacctttgccgacaagcaacgtagtgtgacttatacgaatcttccgaaaggggagtatgtgcttcgtgtccgttctacaaacagtgatggtgtgtgggtagagaatgaacgtgtgctggatattgtcattcttccctcgttttgggaaactccggtggcatacgtactctatgtgctgttgattctagttatcattcttgtggcagtttatatcctgtttactatttatcggttgaagcatgaggtatccatagaacagcagatttcggatataaagctgcgtttctttactaatatttcccatgaacttcgtacgccgctgacgctgattgcgggtcccgttgaacaagtcttgaagaatgataagttaccggaggacgtccgtgaacagttggtggtggtagagaggaatactaaccgtatgcttcgtcttgtcaatcagattctggacttccgcaagattcagaacaagaagatgaagatgcaggtgcaacgtgtggatgtcgtgtcctttgtccgtaaggtcatggataatttcgaagccgtagccgaggaacatcggattgatttcctgtttgagacggagaaacagcatttgtttctttgggtggatgtggataagttggaaaagattgtgtttaacctgctttccaatgctttcaaatatacgccgaacggcaagatgattacgatttttattcgtgaagatgagaataccgtttcgatcggtgtacaggaccagggaatcggtattgcggaaaacaagaagaagtcgttgtttgtccgcttcgagaatctggtggataagaatcttttcaatcaggctagtacgggcatcgggctttcgttggtaaaggaacttgtggagatgcataaggctacaatttccgttgacagccgtttgggagaagggagttgtttcaaggttgagttcctgaaagggaaagaacattatgacgaagaagtcgaatttatccttgacgatgcggaagctccggtaagaatggggcaggtggtggacattgccaatgcatcgcttcaatctgaaactcttgtaacggcagctggtccggagtttgagaaatcgtcttcggaggaagaaccgttagcggaagatacttctaaagagttaatgttgttagtcgaagataatcaggagttgcgtgagtttctgcgcagcatctttactccggtatacagggtggtggaggcggccgacggaatggaaggctggagtaaagcgttgaagtatttgccggatattattatcagtgatgtgatgatgcctgaaaaggatggtatcgaaatgacacgtgaactgcgtgcggatatgatgaccagccatatacctattattctgcttactgccaagactactatcgaaagcaaattagaaggactggagtacggtgcagatgactatatcacgaaacctttcagtgccacctatctgcaagcccgtgtagaaaacttgttgatacagcgcaagaaactgcaaagtttctatcgcgatagcctgatgcatatcaacatggctgctgttcctgaagatctgcctgtatcggcagagggggaatcaagagaagaaaacaggactgaaccggagcaggaagcacaacctgctgttcccgatatgtctcccaacgatcgtaagtttatggataaattggtggaactaatggagcagaacatggataatggcgagttggtggtggatgatttggtacgcgaactggctgtcagtcgttcggtattcttcaagaaactgaaaatgcttaccggattagcgcctatcgagtttatcaaagaaatccgtattaaacgtgctacacaattgattgaaaccggagagtttaatatgacacagatttcatacatggtcgggatcaatgacccgcgttatttcagcaaatgtttcaaggcgcaggtggggatgacgccgacggagtataaagagaaagtggggagataatacgagtttaggcacagagttcttccttcatgtgaagatactaaaaagagaggtcacttcatcggaatgaagtgacctctctttttagtatctatgttgttcgtgatttatggcagccagcgcgggtcaccaaaaccataactctgataaagttcatcagtgatagtgaaatcagccttgtccgggttggcgaacggattgttctcaagaacatttccttctgtgtcgaagcacgttactgttgtgtccgtattgccttcagccaatgagatcaagttcttacagttgtagtaataattgttcgagtaggttggctttcctacggcacttgagttggcaaagccgcgtttgttgttgaagttggcaattacgttgttggtaaacgtgttggtgttacccttgaatcgcagatagaagaagcgatagttggcttcaccgttacctacattatagaatgtacatttatcaatcgaagttaccatgtttgcagttacgctgtttgatgcgtcatcggcacgtagtacgtcccgcttggaggcggagttatagattgtggaacttgaaatggtgagattgttccaaccacctttacggctatcaataaagtcaccaccgtcacacacgatatcatgaatgagggagttttctatcttgatagtatttggtactgctgcaacattgatgtaaataagtcctttaatatagtttcttatttcacacccgttaatggtaaggtcaccgaatcctccttcctttttgtattcaatagcctgactgccatcagtattcgttccatctaacacaacctgatagagatagagtgaagcgccgttatagatatggatacaagtgttgattaccggtggctcggcagaattcttagcagcaatgactacattattattaatttgtaatttggctgctgtcagcacatattcaccgggtgtaagagcaaatttactgcctggtgttgcatcttgaatagcagaaacccaatcgtcagcaggagtaagttcgatagcatcactcaaatccagattagtggtgaaagtagaataaccacgagtcttttcacctaacttcaatgtagctctgtaattggtttccggtgtaagacctgtgatagtggcggagccggaagatatgtcggttgaattcagcgtatacgtcacagtattggcactggagtttgcggtagtaggagcacagatgacagcatcgacctcaatacccggtgtccatgttacttttacagaagtgctctgaatgtcgccggcttttacctttttcatgttctgttcggggttggttgtacgcttgatgtcaacccatttggatgtgcgggaagaattgttttcatcaatggctcttacgcggatgtaataatcagtctctccgataagattggttaaagtcttttcggttaaagttgtggtatatgaggcatccggtgtacgttggtcatagtcgggactgtccgcataaacttcaagttcgtaagaggtagctcctgacatttcattccaactgacaatgatgtttacttcctgtgaaatacgtgcagtgatgccggttggcgacaagacacgattaagaactaaatcattgatatcatctggttcactacatgatgtcactgcaacactacccaggcaaacggcagctaatgtacaaattgatagtatatattttttcattgttgtttaatcatttagttagttaataccactcgtaattagaaagattaggattatcattcaagttgacgttaaagataggccagtattgatatttgtccgggtcgcgaacatagagatagtcaataacatcttccagggcattatctttgatccaagtggatgcttcgcccttactgtctgaaaattcggtatagccttccggattaatatccatttcaccatagttcagaccgtaaaggttcagttttgcatccttttcggtagtctctataccattacgagtccaggtatatgcgctcattttataatatgcatggcctgatagctggctgtaaggatgtttagaatcataatcggtcaaactcacaatagctttcatcttgttttttgtctcgtccattttacttttcaacattccccaacggataagatcagctttacggatcagttctccggcaaactcataagctctctcgtcaacaattgcctggaacatcttttctttactgagagctgcttctgcaacataagctgtaacttctgttgcacggtcggaggtcgcaaaagcgcggttgcgaatcttagtcaggtaaggaacggcagcagatgcaccattcaactcgttttccagttcggcgcgcatcagtacgatgtcggcataacgcatatattgtctgttgataccgtcatcgtttccggtaggaatcatacggttcgtccattcataacgcaactttccgaaactccagcttttgaaagactgaagagtttgtacgccttttgtccattggaatgggcagcaagttatatcacggcgcaagtcctttactgaatagtcaaagaagaaagttggtgtaggaccaacctggcttccctgaagcatggttgtcatattgtcggcagtggtatgcttgataccgaaagtgtacatgatacgtccgcgtgcggggttattgctataacctatctcgaacaatgattcactgcctgcattgataacatctcctgagattccgttgttgttgaagatatcttcaaaatttgattttaaagccacgtaagtgccttcctgttccattacatctttacaagcttgcagtgcgatagggtagagacgtgctttggatagttccggatccgtacttaaacggttttctccgtcaaggtgctgagcgtagccggatgcttgcaggcatacgcgggccaggagaccttttacgaagactttgttcacgcgttccactgtttttgtggcgtctatctcattaggccacgcgcaaaggtcttgtgcctcttgcaaatcaatgatgagctgcttgtagatgacatcacggtcttcgcgtcctgaatacatattgtcggcgttcaatgaagtcaggcgtgcgggaacatctccccacatattaatcaggtcaatataatgtaaggcacgtagcgtgagcgcttcccccaacaattgtttcatattggcatttgtcaggtctgcatattcacgaagaccttcaatagccagattggcacgttcgatagcggcatatatcttagcccaaaggtcggtcccggtactagtgttcatttgatcgtttccgactccggcattgtatgttgccaagtctgcctttccgtcggccttgtccgaactgttatagtattctatatctgtattgtatccataccaaatagcacgtgcacgatagttttgctctccaaattcctgatagatattggcaatggtgccttgtgcatattcataagtactgaaaatgttcttaccgtctaaagatgaaggagaactttgatctaagaaatcactgcaagaagacagactagcaagaagggcgacagctgtcaatgatttaatcgttatatttttcatttctttttcgttttagaagtttaagttaagacctattacaaactggcggctcttcgggtatgcagagtagtctactcccggagtaagagctgttttgtttcgggtggaaacttcagggtcgaagcctgaataaccggtcagacaaaatacattataacatgtggcgtagaaacgcaaattgttaatacccacttttctagtcagggactgcggtagagtataacctactgttaatgtagacagacgtaggaaggagccatcttcaacagcccagtcggtcaatacataactggtatagggtgaccacatggtagtattggcgtttaatgcagccaactgtgcgggatcgtttaccaagtttccgttggcgtcaaggtttgtccaacgtttgccttcggccataatgtcgatcatgttacggtaatagtattgataggacgaagtatattcaatcttattggcattataaacgtcattaccgatactgtaagtgaagtttgcactcaaatcaaaaccatatacgcgacctgaaagggcgaaaccaccactggctttaggattggtattaccgataacggtacggtctttttcatcaatgacattgtcactgtcgtctatattcttcagttttaaggcacccggacggagataactggcaccgataacacctgcattgtttgctacatcttgtttcaatacccatttttcaccgctggcataatagtcttcaaagtcacttacttcataacgtccggcagttacatatccgtagatctcacctactgaatggcctggtttcacgatgaagtcatcctgaatctgtgttgaggcccaaccggatgatgccggatattgtgataatgtacccaggttctttactttgtttttattgaaacctacgttaccattgaagctcagctcatagtttttcttgctgatgatgttccaggtaagagatatttcaaaacctttgttctcagtcttaccgaggttgcggtactggtagtcataaccggaaccggaaacagggaatgcgattagtaaatctttagtcgtattcttataatattcgatgctaccggtcagcttgccaccgaataaggtataatccaaaccaacgttacgggtaacggtcgtttcccatttcaagtccggattggatgcgtaggaaccactttgacctgaggcaatgccgcttgtccaataagaagggaattgattgagccaagtagtagaaccggaagaccatacgggagaagtctggtcggcgggaatattgttattacctgcggtaccataagaaaaacgtattttcaaatcatcaagccaattctgggtcttctccatgaacttttctgaggaaatacgccatgctacggcagctgaagggaaatatccccaacgattgcctttagagaatttggaagaaccatcggcacggaatgtaccgctaatcaaatatttgctttggaaatcgtaattgacacgtccgaagtaggaaagcaagttgtcgtctgcgttagtatatttgtctacactataaggagtaccttgtgaagacaaggcccaagcctgagaagcagtaaagctgacaggaaagaagctcagacggtcatcattcaatgaactttttttattgatagtctcttcaccaaccaatacattcaggttgtggtctttattcttgatgatatctttgaagttgtaatttactgtattggtattgcggaaagtcttacgctgcgtgtcggcaaaataagccatcggatgaacaccttctgtatcggaactgttggtacgtgcattgtaagtacttggaccataatatttcttatcggtattgtagtaccagtccagaccgaactctgttttgaacttgaagttcttgaagatttcccatgaaaagcttccattcatgttgaaagtctgacggttctgcttgcggtctgtgtcatatactgatgtaatcgggtttgtcaactgaaaatccgggtcataactgtcactcaaatcaggaaagttaaacatcgggtagatcataacgttcttcatgcgtgagtcggctgaagatacttcactcttgctttcattggcacctgcaccgtttactgtggtattggcataacgcatagagaagtcgaggctgactttatcatttaccttgtggttaagttttaagcttaaattatcacgtcggaaagaagaccccagcatgatagctttgtcattcatgtgggcatatcccatgttgaatttagttttgtccgaaccaccgctaattgtcaagctatgattgaaggtatttcctgtacggccgaatacttggtcttgccagtcattggttggggcgttttcatacaagtctgcatcttgccagttgccgaaaagactggtaaatttgctttcattacctcgcaacaaggcgtattctctttgccattttacgtaatcagttgcgctcaatgtctccaaggtctttgccatttttttccaggaatagtaggtattataagatacactcagttttccttcctttccgcttttagtcgttaccagaattacaccgtttgcaccgcgggaaccgtaaatagctgtagaagatgcatctttcagtacagtcatatcctcaatatcggatgcaggaatgtcgctgatagactctaccgggaaaccgtctacgataaacagcggagtattgtcacctgtgatagaaccaccaccacgtacgcgaattttcatttctgcgtcaggagaaccttcggtagtggtgatttgtacacccgccattttaccttgcaaggcttctgttgccgaagctacgggaacggcgctcaatacttcggaactaaccgtagcaacggaacctgtgatatctttccgtttggctgtaccatagccgataacaacgacttcatctaatgctttggtgtcgtcagacaaagttacgtcgattttgttttttcctttgattgcaatttcttgtgtcttcataccgatgtatgaaacaataagagtggcattagcaggaactttgagagagaaatcaccattcagattggtaatcgtaccattggaggtatttcctttttctacgatggaagcaccgataattggatctccggttgcatctttcacattaccggttgcggtaatagtctgcgctgatacgcttagcgaaaaaactgctaatatcattagcagtaaaactcgcatgtttttcattcttttagacatcatttttcttttaatatatagattgttaatattataaacattcggttacttgtaaggctttgtttgtgcaaaaataagtcatcgacagcgctatctatgtgcaataattgtttttatcatgggaaatattgtttttccacctctgagtaacaaaaaagcggaagtattgctatatactttccgctttcctgtgtctgtttggaagtgttatgtgtcaaaattctatttctttgtggggaataaatgattgaccagattgttcatatatacttccagatttgtgtattccggacttaaactatacttagtaccatcggcagggtcgttcggatccaaattatttttcttttcccattcatccggcataccgtcaccatcggtatcgactaaagttacttccgatttatattccggccatcctcctacatccgatggctggtctatcatgccgttggtgctaccgtgggaaccttcataagtataattacctttgcgggtttcttctacaatgcgtttgtctattatgtcacgacgatacgaagcaccggcatattcgagcacgtctttatatgcttttttcgcagattgcaaggaagtacgttcggctatattgaaagctttagaggacaacaactttttttcaggtgcaaagtctttcttgattaccagtccgtaggtattgtctctgttcactttgtaaagagcttctttttgtttgtcggtgagtttggaacaagtagggtccatataattaccattaaagtagaatataccgtggacaccggcttcattcttattcgttccatcgtcggcgtatgcggtaaacaaacgtttaaaagaaccttttgtagcgctgaaaggtcccggtttataatagttgttaatgaaattgtaggaacctccttcgccggcataagctccgtcactaccataattatagattacattattgaataaatcaactttttcttcttccggtttaccagtatagcggcttccgcaaagacgaggagtacggttggtgtgatgagccaataagttgtgatgaaaagttgcagtctgtcctccccaaatgcctccatagccgtgagctcctttttcatgaatggagttggcaaggctttcgctgatgatgcaccattggagagtgaaattgcgattattataaaaagtggcgcattcatcggtactccaactcatggagcagtggtcaatgataatattttggtggtttttgatgccgttcatagcgtcgtctcctttttgtttgatgtcaactcccatgcgtgagcggataaaacggacaattacattgtcggcttgaatggagaaagtatagttttttaggcagataccgtcacctggagctgtttgtccggcaatggttaggtctccattgttgactctcagaggtttttgcagctctatgattccgtctactgcaaaaacgattgtgcgagtacctttttggttgatagcccaacggaaagttccttcggaaccgtcatcggctagtgaagtcactatatatacagtacctccggcacctcctgttgtatactttccggcaccatctgctccgggaaaagctataattttgtttcgatcaggggtcggatagtctttcttctcattattgacacttttattatcctgtatatcaatggatatataggttgtcgcacttaccattataggtatagtgagtaaaatgcacagtgctgccggtagttttttattcatgctctttctttagttgattattgttttgatatggaactttattctgattttcgttttaatggcgtaaaggtatgaatatttaggtagctacgtgtgtaataattgttattcgcatagtatttattgttatttgaaacttgtcttttttttaattcaaccataattaatcaacaataaatacaaagtgaaaaacaaatattgcacatgagtatatttctgtttccatacttttgtgaggtgaactcgttcgtaataaaaaggataatcactttaaactatcaggaacatgaaaagactaataaaaggacaacttgttatttgggtttataaagaaaatatattgggaattatattgtcggctttcttttttgggggagtagttgcctgttcatccgaacaggcaacagaaaaacagttgacagatgaatcggggctaccggaatatcctacccccgaccgtaccaccattgttgcttttccgggagcttatggtgcaggaaagtatacaacaggaggtgcgggaggtactgtatatatagtgacttcattagctgatgatggggcggtgggtactttacgtcatgctatacagcagaagggaagacgtacaatagtctttgcagtcggaggagtgatcgaattgcagaaacaactagttatcaccaacgatgacattactattgcaggtcaaacagctccgggtaagggaatctgtttgaaggacaatactttgcgggtgaatgccaataatgtaattattcgtttcctccgttgtcgtatgggagatgaaaaacgaatagaggatgatgcgatgaatggttatcagaataattatctcggaaagcagaatattattattgaccattgttccatgagttggagcactgatgaatgtgcctcattttatgggaatactaattttacaatgcagtggtgtattctcagcgaaagcttgtggcattcgatacatgaaaaagaggctcatggttatggtggaatatggggtggttcacctgccacattccatcataatttgttggctcatcacagtaatcggactccgcgtctttgtggaagtcgttattcgaatcgggcagatgtggaaaaggtggacttatgtaataatgtaatttataattggactaatgaaggtgcttatggagctcagggaggttattacaatattatgaacaactattataaactaggtcctgcttccgccaaggataaaactcatgcacgttttttcaccgcttatatagatgatggaaagaatgcccaagatgccggagtatttggttacttttatgtgaatggcaatataatggacaatacatgtgtggacttgtcaggcgaacagcagaaggagattgccagcgccaacgccaataatacttcttctactgcattcaaggtaaagaatgacgaaagaacatcttctgacttattgttggacatgcgcattgatatcctttctgattacagttttatgcaatctgctacagacgcttacgaaactgtgctggcgtatgcaggggcatggacatgtggctggaaggataataagtatatcattccggagcgagataagattgataggcgtattgtaagtgaaactactaatggtacttatagtactaatgcatctaaaggtggtggatatggtttgatagacagtcaggtggatactatagaaaaatgggacgaatatataactgcaacctcttctcttgtcgatacagacaaggacggtataccggacggatgggaaatagcaaaaggtctaaatcctaatgatgcgtctgatggggcgaagtataatttgagtgctgcttatacaaatctagaggtgtatctgaatggcctggtggagaatacttttccggcaagtcatcccaaataactgttttttaataattagatttcttagttctatttgcttgtgaaagcaggtaaaacaatgagtattatgataagtttcatcgttttttatccggtattcatcggattattgaccgtaaatcagcagaaaagcctgtaaaagcataaagaaatggcgtatctttgaaccattaatcaattaataatagaaataatggaagagaaacaaaaaactttgtctgctacaggcttttccggtaaatatctggtagcttcactttttatcctttcggggatactactgtttgcccgcaatatgggatggattactgctgaattgtttagcacgatagtatcctggtattctctttttattatattaggtatatattcgatgatacgttgccattttgtaggaggaataattcttttgttgattggtgtctatttcttattgggtgggctttcatggttgcctgagaattctcaggcaatggtctggcctcttgctttgataatagcgggtgttttgttgattttcaaatcccgaagaagagggccttggtctcatagccatatggcacatcatcgcaaggaatggatgaaacggagaggtctgggtatgaactttaaagaagaacagcaacaatgcgagtctgtcgatggctttttgcattcggaaaatgtttggggagcggcacgtcatgtcgtacttgatgagctattcaaaggagctattgttcgtacttcgttcgggggtacagttattgatttgcgtcatacccatattgcgttgggagaaacttatatcgatctggactgtagctggggaggagttgagatttatgttccttccgattggaaagtagtattcaaatgtaatactttcttcggtggctgtgatgataaacgttggcataacggggatattaactatgagagcatattagtagttcgaggtacgctttcttttggaggtctggagataaaagactagtgtatgaaagcacatccaattatagattacccttatcgttggattccgatactgctgcttttgctggtgttggttgcggctcaggtagcattagtctgcctatacaccggagctgattaccttcctgccttggtagatgggatagcaacgatgggttggttagctgccttagcctatttggcatggtatgttgtcgggctcgtttcgttgttgcagacagatattatcatgatagtggtaggaagtctgctttggctggcaggttgttttatggtttgtgatagtatggtacggatagcaggtatatcctatatcccttttacacagacaatccctttccggttattgttcgggttgccggttctgattgcggtaactctttggtatcgtttgattaccgctaaagaagaagttttgaatcaggaacttgaaaaagaactgattgagcatcaggtagttgaggcaccggtggaagttccggctggattaattgatcgaatcacagtgaaagacggttcacgtattcatttgattaaagcggatgaactaatctacatacaagcttgtggtgattatgtgatgttaatcactccttcaggagaatacctgaaagaacaaactatgaaatattttgaaacgcatctgccgcctgaaacatttgttcgtgttcatcgttcgactattgtcaacgtaacacagatatcacgggttgaactgttcgggaaagaaacatatcaattattactaaaaaacggggttaagctccgggtaagcctttccggttacagattattgaaagaaagactgggattataaaactgattttatgactgaagataaaactttcatttattaatcaaaaataagcatacatatactattgtttagtatcctcatataaaatcctctttatattctggttaaagaatacaaagaggattattttattgacgtgagttgcatggggtatggtgagatgaaatcataattggggaataaattgcacaatactttcacaagtgtcctcccgtcaatgcctaaaatcaagacaaatctagttaaatagtttctccttttgcaatatttattaatttatcttatggtatttatgattattttaatatattgaagatattttggggcatctttttttacctcgctaatttttcttatgtttgtagattaaataatgaatgaacagtaatgaatatgtcaactcatcttctatataatgattttccaacttttctgcgtaagtattttccctataaagtacaaaagatttcgttgaacgcgggtttcacttgtcctaaccgtgacgggacgaaagggtggggcggttgtacctattgtaataaccagacctttaatcctgattattgccggacagagaagtcggtcactgctcagttggaggaaggtaaatgtttctttgcccgtaaatatcctgaaatgaaatatctggcctattttcaggcatatactaatacatatgcagagttagaaggattaaaacgtaaatatgaggaagcgttggaagtagaagacgtagtggggttggtgattggtactcgtccggattgtatgccggaagggttgttgcgctatctggaggaattgaacaaacacgcttttctaatggtagaatacggtattgagagtacttgtgatagaactttgcagcgcataaaccgcggacatacttatgaggataccgtggaaactgtcgggcggacggctgcttgtggcattctcgtaggcggacatatcattctaggacttccgggagaaacatctgacgctatggtggcgcaagcgggaatcctgtctgaccttcctttgtcaactcttaaaattcatcagttacagttgattcgcgggacccgtatggcgcacgaatatgatataaacccggcggattttcatctgttcacggaggtaaacgaatatattgatctggtgattgactatgtcgaacatcttcgtccggatatggttgtagaacgttttgtctctcaatctcctaaagatttattaatagctccggactggggattgaaaaattatgaatttgtagtacgtttgcaaaaaagaatgaaagaaagaggtgcttatcaagggaagaagtacagggattcggaaaaaagaattatttttgcaggtgataaatttgccactgaataattacctgttttttagaggaagccggtggtgaaagtgaaattaataaagttgaagaatggagaaaacaagaattaaaggaaatgtccactacgtgggagtgaatgaccgtaataaacaccgttttgaagcgatgtggccgttgccctatggagtttcgtataactcttatctgattgatgatgaaatggtggcattggtggatacagtagacatctgttattttgaagtatacctgcgtaagatcaagcaagtgatcggtgaacgtcctatcaattatttaataataaatcacatggaaccggaccattccggatctatccgattgataaaacagcattatccggagattattatcgtgggtaataagcagacattcggcatgattgaaggtttctacggtgtgaccggggaacaatatctggtgaaggacggagattttttggctttaggtcgccataaactgcgcttttacatgacccctatggtgcattggccggaaacgatgatgacatttgatgagactgacggagttcttttctccggcgacggcttcggatgtttcggtacagtagacggtggctttctggatacccgtattaatctggataagtattggggagaaatggttcgttactattctaatatcgtaggtaaatacggaagtcctgtacaaaaggctttgcagaaacttggcggacttcctatttctgctatttgttctactcatggaccggtgtggacagaaaatatagctagagtgatcggtatatatgatcgtttgagccgttatgacgctgatgagggagtagttatcgcatacggaagtatgtatggaaatacagaacaaatggctgaggctattgctgaagaactttctgcacaaggagtcaagaatatcgtaatgcataatgttgctaagagccatccttcctatattatagcagatattttccgttataagggattgattattggttctcctacatatagcaatcagattttcccggaggtagaatcattgctttcaaagattctggtgcgtgaggtgaaaggacgttatctgggttatttcggttctttcgcatgggcaggtgctgcggtgaaacgtatggcagagtttgcagaaaagagtaaatttgaactggtaggcgatccggtagagatgaagcaggcgatgagggatattacctacactcaatgcgagaatctggcacatgccatggcagagcgcttgaagaaagaccgttaaaacagtgaataagattattaatttattaactaacctataaaacaatcgacttatgagacttattattcagccggactatcagtccgtatctcagtgggctgcacattacgttgctgcaaaaataaaagttgccaatccaacccctgaaaaaccgtttgtattgggttgtcctaccggatcttctcctctgggcatgtacaaagctttgatcgatctgaataagaaaggaatcgtttccttccagaatgtagtaacattcaatatggatgaatatgtaggactgccgaaagaacatccggaaagctattattcttttatgtggaataacttcttcagtcatattgatatcaaggctgaaaatacgaatatcctgaatggcaatgctcctgacctggatgcagaatgtgcacgttacgaagaaaagattaagtcttatggcggtatcgacttgttcatgggtggtattggtcctgatggacatatcgctttcaatgaaccgggttcttcattgacttcacgtactcgtcagaaaacattgactacggatacaatcattgctaactctcgtttctttgacaatgatatcaataaagtgcctaaaactgctttgacagtaggcgtgggtactgttctttctgccaaagaagtgatgattatcgtgaatggacacaacaaggcccgtgcactgtatcatgccgtagaaggttctatcactcagatgtggacaatcagtgcattgcagatgcatgaaaaaggtattatcgtatgtgatgatgctgcgactgaagaattgaaagtaggaacttaccgttatttcaaggacattgaagctggtcatttggatccggaatctttgattaaataatatagaacagactctataaataatgggctgcatcaatgttgaattgatagcagcccattttgtaatgaattctgtcgaagaaactaactttcttctaaccaaccttttccctgacgaacaatttccggttcatcctctgtgcattttactaccgttgaaggttctattcctccgatacctccgtcaataactagatccactatatcgccaaacttttcatcgattagttcgggatcggttatatattccagatcctcatcttcatcgtatggcaaggtggtggtcattatcggagcgtccagcagacgggcaatttcccggataatattgttgtccggcatacggatgcctacctctttccggttacggaagattttgggcagtcggtttgttccgttcaggatgaaagtaaacggtcccggaagattatgtttcataagtttgaagacgttattgtccaccttggcatattcactgatactactcaagtcatagcagatgatagacagattgtttttacgtgggtctatctccttgatacggcagatgcgttcgatagcacgctctttcagtccatgacagccgatagcgtacatcgtatcagtaggataaatgataagtccgccatcattcagaatgtcgataatccgttgtaagtcctgcggattgttatttttatcatatagcttcagaagcataatctcttttccttatttttttatttaagtttcttcttcaagaagtccaatgccttctcggccgccttttccgttactttctgtttgatagaatctttgttggcactggcagcagagtcaagtccgagtttctggcctaatttgctgatagcctcatcggctactgcttccacagcctgattggccatactcttggtatcgacactgactttaggtgaagtgaacgaacctccgattctcaaatcaagagtcattagtttggagatattaccggcagatgcaggaagtttaatctttcctgtgtaatcgatagtctggtcgagacccgtgctaccggaaagattcaggttgtagtctcccatttgaatatcgaacggttttgtttctacccgtccatctttgatgatgaagtccagtgtcatatcttttactttcatctctttcaggctgggttgcttaaccgcatcagctatttgatcgatagctttcacaccacttaggctaaggtcgcgtgtggagaggctgccgtctccctgcattgtattcaatatggggctcatggctgcgtccaaatccgtcaacacgttgatactgccggagaagttccctttcagattttcaaagataggagccattttctgcaccatatccagttccttgtaagcttgtgcaaaacctatattcgtcagtttgaatccagctttcaactcaggtttcttggcatcggcggtggaataatatccgttcatcacaacatttcctcccatagtgctcatagacagatttttcatgtctactttaccgtctttgacagtaagcttaccgttcatattgttgaaggacatcttgtcaaacagtacttgtttcagattagcgtccatttggaagtcgatgttgcggggaacttcaacaattcccgtggaactaacggaatccgtagttgttacatcaccggacgaagacatttcttcacccgtagccgacatgaaatcgttcagattgaaatagttggaacggatattcagacttcctttcaaggtagtgcctttcaacgcataaccgatatagttttcgaaccggctgtcggcagtaatgtcattcttaccgatgttgacggttgtttcgctcaactgaagatatttgggtgtaaacgtaaagagtgatttcttaatttctacatccggcatatcctgcattttaagtttcatgtctgttaaaccaatcgttccagcagccagtatgcggtcgtattgttccttttcgatagatgaaaggcgcccggacatttgcatatcagcgtcgattgttccgtttagttccatatctccaagcggatatacttgtttgatcataccaaggttaagaattccttttgcttccactttgaagtcaggatcgctgaccggcgttttcacgtaggcagtcagactgaacgggttacctgccaggcggaagctaaacgggttaatatccaccgtcgtcaggtcgatatttcctcccggattctgtacgttggcattgatgttaatttggtctactcctgccggtaaagccggatagcggaacatggcatttttgacttgcatatcgacattgaacgcaggtacggtatctcctagcagggtgcctttggctgttgcgttcagtgtggcggttccgtcggttttcaggctggaaaattcggtggcatagatagccgggattagcgaaaggatttctttgaaacctatatcgttggtattgagtttcaagtccatgtcgatagccgggtctttcaaggctacccagccgtcaatacctgcctgaatagcgttgaggcgaatggtgttatcctttaatgtgtacttgttattggccagatcggcgtccacatccatttcagcggagatgttggcattcgccaagaaaggaatcccgttcatcttgtaagtcagggattttgtttccgcttccagtttcagtgtggtgcgttcactgcctaagtctccggcgcaggttgcgttaaagtcttggatgtcagcatacatctttccttgttggtcatcataaatcagattcatgttttttatgacgaaacgttggagtttcactttgaaaggggaagattcttcttctgcagcgggagtctcggcagcggctgtcgtatccggctccataatgttccagttggcacgtccgtccggcaacacaatggcatgcagctttgtgtcttcgatgaatattttggaaatatcgtaaccgctatctccgaaaagagagaataagttgatggcggcagtaacttctccggcttgtacaagggtatcattggcaaattcaccagtgccttttagccagaaatcttcgagagtgacagaagcctgtggaaagttgcggaacaggctaatgttaagtttcttaaagtcaaattgcgcattgagcatcttgttgccttctgtttttacaatatcggctatcttaccttggaaggcgaaaggaagaaggagcattagaatgataattactcctacggtgatagctgcgattttcaaaccttttttcatttgcttctattttaagagtctgataatatgtaaggaacaaaactaataaaactttttgataataagggataaaagagatttttttagggattcttattttaaaattaggggaatccaaagcacggaattatggcagggagtggttgaggcaatggctcttcaagggttgtagtggaggagattcgttcttcggtgagcaacggtctctttctcggtgaggaacagtgtattggtcagtgagggaaaaacggtcggttcccgtttcctcccttttgtatatatttattgttttttctttttcttcagttcctctgcaattctccattgtaacgcagcttccacttcctttccggctttcagcaaagcgtctccaaaaagttcgtgtgcaccggcgtgttccggtttcagacttgtagccttatccagatcggcgattgcaccttctgtgttttctgttttcaaccggagttttccccggttatagacagctttaaaatttgccggatgaaggtttactgcggtattaaagcaattttcagcgtcgaaataatctttattattgaataaagtaattcctttacgtatccatgcgtctatgtagtttggatcgaggctgagcgctttatcgtagttggcaagggcagcacgtatatcatgtgcttgggtgatacattcgtttcccattaacagatactcatgggcgtattggcgtaggcgttcctgttgttcccgcatctgttccttgagctttttattctgttctttcagggtgttgataatgccgagttttcggcgaatcaggcggcggggaacaggtttttcaatatcatagcgggaatggatggcacggaagaattgttccagacattcctccatatcacctttattgaaagcgcgggcggctgcggcatattgcacatcggcctgtgcctgtttcaatgccttgtcaatagcttgccggttattaaatcgtccggcgaagttgacgatttccggacggacgaaaatatctgcccggttaataggctttttgagttggataccatccagagaagtacaacggctgagtgcgacatacgcttgtccaccggcaaatactcctccagtgaagtcgattaccacccggctgaaagtcaggccctggctcttatgaactgtaattgcccaagccaaccggataggatattgagtgaaactacctaatacttcttcctcgatctctttcgttttttcgttgtagcgataacggatattgcgccatgaatcccgtttaacgtcacattctttcccgtcatcagtgataacgtatatcgtttcttcttcttcatcaataccggcaatgacgccaatagtgccatttacccaacgacggtcaaagtcattcttgataaagataatttgtgcaccgggttttagcactagctcttgtgaggtgggtaaactgctttcgggaaagtctccttcgataactccttcaaaagtaatcgattctcccggaagctcggccagttttttttcgttgattgaatctaccgtatctcttcgggtagcaagcgtgatatacatatccgcttctgattcttcaatctggcttccatatcgggtattcaacagttggaggtcggctgctccggcagtattagtacgaatgtggtcaagtacaccgacaaaaaccggatcagtctgccggtaaaccttttgcagttcgatagaaactaaatctatctgaccgaatactcttgctgagaaaaagtaaggagtaggatagaaacggttcagtatttcccgttcatcattcttcacgacaggttccaattggaaaacgtcgcctaccaatagtaactgttttccgccgaaaggttcgcgcagattatgagaatatacccgtaagatgcggtcgattgcatcaatgatatccgcccgtaccatggaaatttcgtcaatgatgaccagttctatctgttccaataacttgcggtgcggcttcgtatatttgaagaactcatggatacgaccgcgttgcagacttaaattgggatcgtccggcaatagaggataaaaagggagtttgaagaaactatgcatcgtacttcctccggcattgattgcagcaattccggtcggagcaagtacaacatatttctttttggtatgctcgcagacataacgcagaaatgtagattttcccgtacccgctttcccggtcagaaagaccgactgtcgggtgtactgaatcagattcagtgcatcctgaaatgcagcattgtcagtgtctacgctcatcttcgtatttgcttgtctcaaataattccgaaatgtttcattgctttgctgattccgtcttcgtcaatcgaagctgtcacatagtcggcggcagctttcacatcctctttggcttgtcccatggcaattccgatagcagcatggcgaagcatactgatgtcattgcctccgtcaccgaatgccatagtctcttccagtttcatatcgaagtaacggatgatttcgtcaatgcctttctgcttggtatcccctttggccgtaatatcggcaaatgccgggaaccaacgccctacttcacaagtagggatagacggacggatctccttttcttcttcttccgtgatgaaaggtgtcatctggatcacctccttgcttgttgcttcctcgaacgaaacagtcggaataacattcacgtgcaggaaatcatagaatatcttttttaccatgtcgttaggctggcaaacggatatgttgtgttcctccacaaagatacacggtactccttttttctcgcagaaagcagccattgcttttacttcctcctgtggaatagcgcttttgtaaataacttgttctccgataaaacaataggctccgttcatggttatatatccatcaatgagatttctgtcttgcaattcggaaaggttgttgataatggctttcgggcgtccggtagcgataaatattttgagcccttttgcgtgggctgcctccaatgcctcaatggtagaaggcgggatacggtgagtttcaaaactgaccagcgttccgtctatgtcaaaaaatagagctttcgtcataaattcctttttgaattgagtacaaatgtactacttttattccaaaagttaaaatataaccaggtattttatgtataattctgataatcagttgtttgtttagggtgcgtcacctttaatcctgaaaaataaccataataattaaccctgaaaattaatcattatgctgaattatgagtaaatattttttttgattttagaccggattttaatctgtcctcaaatccgcaactacgcgcctaatatgatacagaagcgaaaagaatctgcatcgttagtaaaaagggggcacagtgcatcgaatgtcaccataaagacatataaatgccccttaccccaccatgcgacttgaggcaatacgcaaaatcacgactataagttgtcggtgttatccaaagtcattctggaacacattggcataagcattgttgcatgaatagatattcagcacatacttccttgatgtcctgacccatttggctggcacagagatgaacttaaagacaaacgtcttgatgcggcttgttgctttgagtccgaacctcttcacgtcaagcctcgccatgatgaatttatagaagttgcgtatgagtgccataagcagaagaaacaccgtgttttctcccataaaggattttggaagcctgttccagccgaatccgttattcatatcatcgaagatgcgttccttccctccacggaggttatagaattcgacaatctctttctcggaagactcgtagtcatttgtaaggatgcagcggtaggtgtattctccttcccacaggtcgagttcgccgtctatccgcttctgtctttgaatcacaagacggtatgccttccctttccatttctcgatgagaatggaggccagctcaaactcaatgccgcccaattccactttcttccaacctctgagggcaaagatgtcattgtagagcgaactgcatcggttagcacggatatagaaggtcttgcagtgtttagcaatctcttccactatctcttcagaacacgagccgcaatcagctctgaaacggttgataataagcttgttttgttcaaacctttcaaagaacctcttcagcgtgtccttctggtggaaacggacatttgtgttgccgtcgctgttctcaatgccgacaatcaagttgccaataaccgccacgccagggcgataaccaaggaacttcttgtatgtaggcttcgcatcaaacttctcagcctctatgaactggtggtcgaagtcaacgtcatacccctcgccctctttcagctgccctgtggacaataggcaattgaggagcagtgtattcagcttgtctgccgtgttgaagtcgtaggtcttgccagtgtcggatgtgtaggaaatgttatcctgggtcagttcctttatggctctaagaatcgtgtcggcactgcatgtgcgaagtgtcggatgaagcgaaaggtggtacatcagatgagtggtgacatcctcgatgcatgagccgccacaaaaataaacgctcataagcgaacggatgatttcgctgtattgataaccatacagcctgcatctcataccgagggttgagtcgattacagatgagagtctggagtcaaattgctccattattgaaaatattcctccaaaaggagtgagtttctcggatttaattgctacctttgccatgtctgtcgggtttgatacatattttgatttgcaacactaagataggtgaaaaatctgacatggcaaattcctgagcaactttttgttgctcaggtacttaaaaagttatatttgtaatagtgttgcggaattaaggtctgtttaatccggatacaaagagagcgactacaatctattatactgtagtttattttatctgtagtatggtatatgctggtctaagatggaaattgttgcaataaaaaacaaaaaaacatgtttaaacgtttttaatactatattttttctaattttgtggctttctgcccaaggagtgtataaattggacagtaggccctttttgtggggaaatattgagtgggaaatatttagtgggaaataaatgatggtatatgtgatgagaaatggtcgcagggtaatagttgcgttatcatttctgttattatgttgtggtgtacatgtgcacgcacaacgggtggctgtgaagacaaatgcattgggttggctgaccgccagtccgaatgtagaagcagaatttgtattgggtagtcatgtctccttgaacatagggattgctgcgaatccaatcagtacagacaactttaaaacgactttcacgcattttcagcctgaagttcgttactggctaaatcgtccgatggtgagccattttcttggaatcaccgctttcgtgaataattttaatatgatggtaaaagatgtgcatcacaaaggtgatgcatacgccgccggtttgacctatggatatgtatgggtgctgggcgatcattggaatatcgaagcaactgccggagtgggtgtgttgcgttaccgtcagttcaagtatgataagggtattccgaaaccggatgcggtcaacgatagtaagaccaccattgcacctgttaaactgggggtatcctttgtgtatattattcgataacgaacattagctagtcagaaaagagaatgaaaatcaatttgaaacgtgatagattaacaggtatacttctcgtggcgatgatgttcgtcggcatgaatgtatccgcccaacggatccgtgtgcaggggcatatcacaaacccgcagggaaaaagtgttccgaatgtgaatgtgctgaatccggtcaatgacgaacgtatagaaatgtccgacgaggatggccgttacagtgtcttagttgagaaaaacggctcgttgaagtttacatgtgtcggttatgaagacaaaacagtgaaggtggcaggaaagcaaattttgaatgtagtattgaaagatgccgtcatcgagctgaacgaagtaacgattacttccaaagtgaaggacaaagtgattccggaacctacggacatcgaaatcaagggtaattatttccatctgaaaacccgtgtcccggtgcctaaggagatgtttaactcgcatcgtcgcttggtattgcagccttccatttatgatgtgacactgaaaaagcgtctgttgatgcgtcctgttgtattcgacggggatacttataatacaacgcaaaatcgaatgtacgattatgatatagataaagaccctttacatgattacatccgtgtgaaaacgacttcttcacgcaagggggatattattgcttaccatgattctatctatatagaatatctgcaacatgactaccgtgcagatgtgcatttggcaatggagaattacaggaatatcatttatcgtgactctttctccattgcacgcggaacggtcaacccacttcgttttttggagtataaattctccgctttcagcctgacggatgagaaatatcttccgaaacctgtgatgcagttgcgggatacgaaaggcgaggtaaacttgacctttttggtaggtaaagccgacctggatgataagaatccacagaatcaagtggaactaaaccgattgaatcaggaattacgtagtattgagatgaacccggatgcctctttgaagagttttcatattacgggggtggcttcgccggacggttcttacgagacgaatcttcgtctggcaaaattgcgtacggataaagccctgggacgtatactggcacaactggacccggaaacacgtaaactgttggaagtgaaatcggatgcatcggttgcctcctggaaggaggtagcagaattgctgaaaaaaaactccaagccggaactggctaaagaagtagaggatttaatcaaacaatacgcagctactcctcaccgattgaatggggtcttgaaatcgaaacctttctacaaggaacttgcggctacttatttgcctaaattgagaaaggtgcaatatacctatggttattcaattttccgctctttaacggactacgagattagagaactttacagaaagaatccgaaggaacttacccgtttcgaatattaccgtatgattacgacggcaaaaactcccgacgagagggaaaagtattgtagggaggctcttgagctttatggtaactttacgtatgcagccaatgaactggcagtagtaacgatacagaaagatactccggattcaaatattctcgaaccgtttgtcagtaaatcggcaccggtggagttattatccaatcaggctattgccttgctgcatgaaggcaaatatacaaaagcagattcagtcttgacgttggttcccgaagaagcggtttctgaagatttgcaggccatcgttcaagcattggccggttattataatgatgctttcgagaaggtggcggctactagtcctttcaatgaggtggtgatgctattggcaatgaagaaaaatcaggaggcatgggataagatttccaccatggaggtagagaccgcccccgaatattatataaaagcgattgccgccaaccgcctggagaaaataggtgatgcgattatgagcattgagaaggcccttgaacttgatccttccttattggaagtagcgaaggtggatggtgatattattgacttgctgccagaagagcagaaaattaaataatgatatatacaacaagagtaaacgatgaatatcttcagaatcaacaataaatatgtagcagtggcaatcttcctgatgcttgctgttaccttacgggcacaggattatggtgcattgcaatatatgttacagaaacgccctgcaaatgaaaagttcgagagtaatagattcaatgaacatctctttttctctgccggaataggaccatacagcttgttaacaagtggagatagtcaggatggaatgggaatgaccgcccatctctttatgggaaagtggattactccggttcacggacttcggataggggtgaatttgggttatctgtcgtcgggtatctacgattctaaaataaaaatgggtggcggcagcctggactatttgttgaatatgtcctccctggcatacggatacaatgcaaatcgttgttttgagttagtagggattgcagggatagaagccggttattctaaggtgggtgacaatagcgatcgttccgaaaagtatccggatttgaaaggtggcggtcagctttattatggtgctcatctcggtttacagggaaatgtacgtctttcttctacattggatttgtttgtagagccacggatcggatggtataatgacagttttgcgtatacggaaaattggagaaactataaaatggctggttcagttctggtaggtctgacctatatgcctggtgctccaatgggaactaagatacatttcgatggtttcgataatagctccttcctgaatcatatgtttatctctttatccggtggtatcagtacactgaaagttccgggaatcaagaatacgattaaaggattaggtccccagttctctgccggaatcggtaaatggttcagtccttcttccggtctgcgtttgtccgggacagttgggatttcggacaccccttcgggcagcgcaagcggttactttaaacatgtcgatctgcatgctgactatctgttgaatatcaataatgttctttggggatatgatgaagacagaatatttagtctgatcggtattgccggagttaatctggcaggtacgaaaggagtggataaaaccgccaagtatgctccgggaataggagtcggtgtgcagggaagtttccgtatcaaccgttctgtggatttatttatcctcaaatccgcaactacgcgcctaatatgatacagaagcgaaaagaatctgcatcgttagtaaaaagggggcacagtgcatcgaatgtcaccataaagacatataaatgccccttaccccaccatgcgacttgaggcaatacgcaaaatcacgactataagttgtcggtgttatccaaagtcattctggaacacattggcataagcattgttgcatgaatagatattcagcacatacttccttgatgtcctgacccatttggctggcacagagatgaacttaaagacaaacgtcttgatgcggcttgttgctttgagtccgaacctcttcacgtcaagcctcgccatgatgaatttatagaagttgcgtatgagtgccataagcagaagaaacaccgtgttttctcccataaaggattttggaagcctgttccagccgaatccgttattcatatcatcgaagatgcgttccttccctccacggaggttatagaattcgacaatctctttctcggaagactcgtagtcatttgtaaggatgcagcggtaggtgtattctccttcccacaggtcgagttcgccgtctatccgcttctgtctttgaatcacaagacggtatgccttccctttccatttctcgatgagaatggaggccagctcaaactcaatgccgcccaattccactttcttccaacctctgagggcaaagatgtcattgtagagcgaactgcatcggttagcacggatatagaaggtcttgcagtgtttagcaatctcttccactatctcttcagaacacgagccgcaatcagctctgaaacggttgataataagcttgttttgttcaaacctttcaaagaacctcttcagcgtgtccttctggtggaaacggacatttgtgttgccgtcgctgttctcaatgccgacaatcaagttgccaataaccgccacgccagggcgataaccaaggaacttcttgtatgtaggcttcgcatcaaacttctcagcctctatgaactggtggtcgaagtcaacgtcatacccctcgccctctttcagctgccctgtggacaataggcaattgaggagcagtgtattcagcttgtctgccgtgttgaagtcgtaggtcttgccagtgtcggatgtgtaggaaatgttatcctgggtcagttcctttatggctctaagaatcgtgtcggcactgcatgtgcgaagtgtcggatgaagcgaaaggtggtacatcagatgagtggtgacatcctcgatgcatgagccgccacaaaaataaacgctcataagcgaacggatgatttcgctgtattgataaccatacagcctgcatctcataccgagggttgagtcgattacagatgagagtctggagtcaaattgctccattattgaaaatattcctccaaaaggagtgagtttctcggatttaattgctacctttgccatgtctgtcgggtttgatacatattttgatttgcaacactaagataggtgaaaaatctgacatggcaaattcctgagcaactttttgttgctcaggtacttaaaaagttatatttgtaatagtgttgcggaattaaggtttatagaacctcgcctcaatgtgtatagtaagagatatgcaggaggtcgcggagtaggtcgcaatacagatcagctcagagagttgaattttggcttgacttatcatacgattgaccgtgcggcacgtccgaagaacagattctcaagcaatcacatcgcagacaatctgtttatgacttcgggaattggtgtgcaaatgttcttgaataagacgaaccttgaaaaccttggttctttaggtccgcaggcttctgtttctataggtaagtggttgagcccttattccggtttgcgcctcgtgggtacaggtggattttttacgaactatgtagttccaggaagtgttaaagcgggcaaacttagacatgccagcgtcagtggcagtcttgattacttgtggggcataatgtctaccatgagtggatacaatcccgatcgtatctttgatttaataggttcggtaggtatcaaccttgcttatacttccaaatcagaccataaattccaaccgggtgttaatgcaagcatacagggattatggcatgtgaatgattttctcggtttgtacattgaaccgcagattcgcttttatggagataaatttattgaaggtaatctgggctttatgcagaaagacgtgatggtaggagtcaatgcaggttttcactatcgctttgttccttattcaaaaacagccaatcgtagcgtgtttggtctggatgacaagcgttacttcatttctggtgcacttggattgggtagcttgcttgtagccaacaaagacttggtgaagaatgcaggtgtagaagcaaagggaagcattggtaaatggtacactccgttatctgcatggcgggcaaatggaacaattatgtacaaggccaaaacgtcgtcaaagatgaatctccattatgctggtttgggtatggattatatgataagtctggccacattggcaaaaggatacagccccaatcatgtgatagatgttgttccttttgtgggagttacggccggactggtacgccgttatggtaagttccgagcagtgccgggactggatgctggtgtgcaggtaaaactgaaggtggcttcttctttgtatctgtatgccgaacctaaagtcggtatccgtaccgatacatacgatggctccgaacagggaagacctgaccgtgtaacttccatggtaggtggattattatacagattcaaaatgcctacttttcagtaagaaagaactttaatttctaggtaaatctcctttattgttcgtaatagtcaataaaggagatttttacattggttatttcttctatattttccgttatcagtttgttaacttgggtggaatagaaagtgtaatgaataataatttttccctttttcgaactatacaattcaatggaaatatctatttttgttcctggttagcaaaatgggttaagttctgatttaattctatgtaagtgattaataatcagtattaattataaatatgctacttctgtcttacataatataaaaaacatcatgcagtatgaactataattttgatgaaataataaaccgtaaaggtacggattccgtaaaatgggatgctgtggaaggtcgttggggacgcaatgacctgattccgatgtgggtggccgatatggacttccgtacggctccttttgtgatagatgctttgaagaaacgcttggaacacgaagtgctcggatatacttttgcctgcaaggaatgggcggagtctatcattaactggctgaaagaacgccacgggtggacgattagcgaagatatgctgacatttactcccggcattgtgcgtggattggcttttgccatccattgtttcacggagaaaggagataaagtaatggtcatgcctcctgtttatcatcctttctttctggtaacacagaagaatgagcgcgaagtcgtgttcagtccgctgatattgaaagacggccagtatcatatagacttcaaccgtttccgcaaagatgtgcaaggatgtaaactgttggttttgagcaatcctcataacccgggcggacgtgtatggacgaaagaggaactttctcaaatcgctgatatctgttatgaaagcggcacattggttatttctgacgagattcatgccgatttgaccttacctccttacaagcattccacctttgctttgatttcagaaaaagcacggatgaattcacttgtctttatgtctccgagtaaagcattcaatatgccggggctggcaagttcttatgcaattattgagaatgacgaacttcgtcaccgttttcagacctatatggaagcaagcgagttcagtgaagggcatttgtttgcttatcttagtgtggctgccgcttacagtcacggaacagaatggctggaccaggtcattgcctatatacagggaaacattgattacaccgaacactatctgaaagaacaggttcccactatcaagatgatccgtccgcaagcttcttatctaatctttcttgattgccgcgaattaggattgaaccgggaagaactgaatcgtctgtttgtggaagatgctcatctggctctgaatgagggcactacctttggcaaagaaggcgaaggttttatgcgattgaatattgcttgtccgcgtgctacattagaacaggccttgaaacagttaacgcaggcggttaataatagataggattataaagttataatccggttatgatattttcaaagtattctctccgttatgagagaatctcattgcgacaagaataaaatttgtcgcaatggattgcaaaaaaaacgtcttatgggcaggaaactcttgacaaagcctttttgattttgtatatttgtagatccaactatcaatggataaaggaaaaatttaaaaataatgaaaaataaaatagtgcaatattataacaatataatagtagtttcttgcagtagttaagctgtgagggggggcgtataaactaaaggctgcgaatctttatagggtttgtagccttttttgttgcaaaaaatcatatttctatccttgatttcggaatttatagtttatccttaattccgcaacactattacaaatataactttttaagtacctgagcaacaaaaagttgctcaggaatttgccatgtcagatttttcacctatcttagtgttgcaaatcaaaatatgtatcaaacccgacagacatggcaaaggtagcaattaaatccgagaaactcactccttttggaggaatattttcaataatggagcaatttgactccagactctcatctgtaatcgactcaaccctcggtatgagatgcaggctgtatggttatcaatacagcgaaatcatccgttcgcttatgagcgtttatttttgtggcggctcatgcatcgaggatgtcaccactcatctgatgtaccacctttcgcttcatccgacacttcgcacatgcagtgccgacacgattcttagagccataaaggaactgacccaggataacatttcctacacatccgacactggcaagacctacgacttcaacacggcagacaagctgaatacactgctcctcaattgcctattgtccacagggcagctgaaagagggcgaggggtatgacgttgacttcgaccaccagttcatagaggctgagaagtttgatgcgaagcctacatacaagaagttccttggttatcgccctggcgtggcggttattggcaacttgattgtcggcattgagaacagcgacggcaacacaaatgtccgtttccaccagaaggacacgctgaagaggttctttgaaaggtttgaacaaaacaagcttattatcaaccgtttcagagctgattgcggctcgtgttctgaagagatagtggaagagattgctaaacactgcaagaccttctatatccgtgctaaccgatgcagttcgctctacaatgacatctttgccctcagaggttggaagaaagtggaattgggcggcattgagtttgagctggcctccattctcatcgagaaatggaaagggaaggcataccgtcttgtgattcaaagacagaagcggatagacggcgaactcgacctgtgggaaggagaatacacctaccgctgcatccttacaaatgactacgagtcttccgagaaagagattgtcgaattctataacctccgtggagggaaggaacgcatcttcgatgatatgaataacggattcggctggaacaggcttccaaaatcctttatgggagaaaacacggtgtttcttctgcttatggcactcatacgcaacttctataaattcatcatggcgaggcttgacgtgaagaggttcggactcaaagcaacaagccgcatcaagacgtttgtctttaagttcatctctgtgccagccaaatgggtcaggacatcaaggaagtatgtgctgaatatctattcatgcaacaatgcttatgccaatgtgttccagaatgactttggataacaccgacaacttatagtcgtgattttgcgtattgcctcaagtcgcatggtggggtaaggggcatttatatgtctttatggtgacattcgatgcactgtgccccctttttactaacgatgcagattcttttcgcttctgtatcatattaggcgcgtagttgcggatttgaggtttataataaacttggataccgtttataataaactcttcaatagtttattaaaaacgaagagattgttttaatgagaagagtctgcttttttcttttttgttatggaatgagatgtcctttatgggagatttataatgaaaagtaaatgatgcagatatgaatgtaatagatttgcatctttttagtatatatttttattgattaaattaacgatatttgatgtttgcttaaaaaagaagtgtatatttgcaaattataaataattgtaatctggatcgtttcaaaatgaccaagcaatgtcgataaaacctgatataaacctgacggtagatgaggatatagtgctatggcattctatcagtagaggagataagaaagccttcgatgacttttttatgaagtactataccttattatatgggtatggccgttattatgtgtcagcagaagacgccaaagaagtgttacaggaattgatgatgtggctatgggaaaacaggacgacttttgtgccggatactacttcctcttctttacgacaatatctgattacttctgtcaaacgtaggtgctttaatatacttcggagacaagaaaaggaaatgcttgaagaatcatcgtggtttgagcaagagcaggatgctttttatgagtttatagatttatccgttgtcaatgaactgcaatcacttatccaagaggctattgacgaattaccgccttcctaccatcaggctttcgctatgcatcgctttcaaaacaaaacccgtcaagagatagccgaagcattgcaagtgtccattaagactgttgattaccgcattcagcagtctctcaaaattctgcgggagagattgaaagattatcttcccatattggttatttacggttttatgttataatctccctcccttctttttttcatctgctaagttttttatcgaacagcaataaaaaaatcattttttgtttagtacatcctccggtttctgtgtattgtatatgtaggcgggtaataaaacgtttacgatgtcaattatgcaagaacagaaaatgatagatgaatctttgctacttcgctattttgaacaagaggtcagcgaagaagagaaaaaaaaggtagaggaatggatacatagttccgaggccaatagccgtatggctaagcaagtggcgcggatctttgtagctacacgtctgttgcatggctcgaaagaggcatccccccagcaggcgttacagaatttctggagacaagtggaacggcggaaacacaaacgcatttggcgatatataggaaaggttgctgccatattagctctccccgttcttattctgactactatttattggttttcagataacagtgatggaaatgatgccattgtgtggatggaagctcgcggaaatgacagtgaagtttgtactgtgcttttgccggacagcagtacggtttatttaaattctcaagcgaaactaaagtatcccactcactttgctaaggaacgcagggtgtatttagatggagaagcctacttcgtggtgcgtaagcaaaatggtaaacgtttcattgttcatactgtttcagaggctgaagttgaagtgttgggaacagaatttaatgtcaagactaacaggcaaggagcaagtacgacactggttagcggggcggttaagtttattagccgaacggctgataaaaaagaaagagctgtgttgatacagccgggacaaaagatttcttatgatgctgaaacggggaaatctaaagtggaggaagttgatatagaaagagaaataggatggaaagacggaaaaattgttcttgaagattgtccgcttcaagaagcgcttgatatcttatctaaaaaataccacgtgacattccgtattatcaatgacgaattgcaaaatagtcgtttcaccggcacaattaaaaatcagggggtggaacagattataaagaatctttctatttcttgtcggtttaattatcgtattgtaaagaataatagtccgggaaacgacggaactaaagcaacaatagaattatattaatcatcttaattattgacgtactatgaaagcaccaacttgaaaaaagaaacaaaaaaaaatatagaaaagcactgccatgcttttctatattgaaaaaacgagatcgcttgtctgccaacaagcaacaatcattttttaccaatcttaaatcacattttaaagttatgtatttatgtaattacaaccaaaaaaatgtccgaaaaaatacttttttatgggcaattggtaaaatccctttgtttatgaggttctttattatgtttatgttcatgtccattgggatttcgtatgctgagaccgttcattctcaaaatgcggctatggaattccgttttcaggatgtgactattgaaaaagcactcaaggaaatcgaaaaaaaaacggggtacaatttcttttataatacgaaagattttaacgttaagcggaagatttctttttctgctaaaggaatgaatttgtccgaagttcttaatgggatatttgcgaattctcaggtggattatgtgataaatggcacagatatcgtgttgaagcggagagaagaagtaagtaatgtaagcaacgagaaataccagattaagggttctgtccgggatggaaatggagaacccgttatcggtgcgtccgtagttttgaagggacatactgagaccggtgtcatcactgatattgatggcaacttcgtgttgacagtacctgctaagaaagtgacattgagtatctcttatataggatatgatccggtcaatgtggaagctacggtaggcacgtttgttaaggtagtcatgaaggaatcttcacaaacgttgaatgaagtggtcgtagtaggctatggtacgcaaaagaaagaatcagtagttggttcggtacagatggtgaagcctgacgaactgaaagttcccagttcccagttgtctacaggttttgccggacgtttggctggtgtggttgccgtacagcgttccggtgaaccgggggctgatggggccgacttttggattcgcggtatttctactttcaatggcacaaggagtccattgattatcattgatggtgtgcaagcttcgagcggtgacttgaatgctatcgatccggaagttattgagagtttctccgtgttgaaagatgcaacggctacagcgctttatggttcacgtggtgcaaacggtgtgatgattgtcaaaaccaaatcgggacgtgaaagtgacaaagctatcgttaatattcgtttagaaaacgcgtattccacccataccaaaacgccgaagtttgttgatggtgtgcgttatatggagatgtacaatgaagccgtgttgacacgtggtacaggtgaggtgctttattccgacaataagattgccggtacaagggcaggattggatccgcttatttatcctaacgtgaattggtatgatgaattgttccgtagcggggctatgaatcaaaatatcaatgttactattcgcggtggttccaaaaaattagattattttagcagtgtgtccgtcaaccatgatagtggtgtgttgcgtaataccgatgattttagttataaaaataacctcaacatcatgcgatatgtgttccaaaataacttcaatctgaatttatctaaatcaagtaaactgtcgttgaacttgaatgtgcaactgagggactattctggtcctacctctaatacgagtgatctgtttggtatggttatggaatccaatccggttgattttccggtacgtttcccggatgacccaaatgtggattacattcgttggggtggaaaatccggtggtaaatataatagtggcttccgtaatccatacgctgaaatggcaagaggatatcagtcacaatttgaaagtacagttatggccaacctgaaatttgagcaaaaacttgatttcattaccgaaggcctttctgcagaagctttgttctcgttcaaaaactggagtagtactaacaccaatcgttcggccggttacaatcagtttcaggtaataaactataatactgacaatttgtcggactacacgttgaatcgaattggttctgaacaaagtactgtattgcagacctcgaataaatcgagtggtgaccgtcgactctatattcaggcaatgattaattataatcgtacgttcaatacggtgcacaatgtatccggaatgttcctctacaatcaagaccaatacaacggtaacgctcctgaggatctcattgagtcgcttccgcaacgcaagcaaggatttgccggtcgcgtcacttatgcttatgattaccgctatatggctgaattgaacttcggatacaatggtagcgagaactttgctaaaggaaaccgttttggtttcttcccttccgtggcagtaggatacaatatcagtcgtgaaaagttctttgaaaagttctctgatgtggtgagtaatttgaaactgcgtgcatcttggggacttgtaggtaatgaccaaattggaggtgaacgttacatttatctttcaaacatagagttggaaaacggtgatttgggatatacaacaggccgagatcaaaacatttcaaaaaatggtccgaaatatatccgttatgccaacaatgatattacatgggaagtaggtagcaaatggaactttggtatcgacttgggtatcaagaatgaactgaacataacgttcgatatcttcaaggaaatacgtaatgatatctttatggagcgtcaacagattccggactactggggtacgaatggaaaggataaatggatgaaccttgcgacaaaaatgtatggtaatcttggtaaagtggaaaataagggacttgatttctctatcgactatgtgaagaggttcaataacgatttcgatatgtcattcaagggaacatttacgtatgcccataacaaagtgcttgaatatgacgagccggatttccagaaatatcccaatatctcacgtgtgggacattctgttgaccaacagcttttgtacattgccgaacgtctctttatcgatgattccgaggtgcaacgtaatccgaaacaaaaccttggaggctgggtgagcggaggtgatatcaaatacaagaacttgccggacgtaaacggtaattatgataatgttatcgattcaaacgaccgtcaatatacaggtatgccgacaactcctgaaatagtatatggtttcggtccttcattccgttacaagaagtttgatttctctttcttctttcaaggtgcagctcgtgtgtctattatgatgaatggtatccatccttttggtgctgaaggtacacgtaatgtattgcagttcatagctgatgactattggagtgaaactaaccaaaatatctatgctgaatatccgcgtctcagtaaacgtgacaatgaaaacaatacaaaagcatctacatactggcaacgtaacggtgcattccttaagttgaaaaacttagaggtcggattcaaccataagtttttccgtgtttatctgagaggatctaacttgttgacattctctccattcaaatattgggatcctgaaatgggaagcggtagtggattgtcttatccgactcaacgagtgtttaatgtgggtgttcaattttcaatcaataaataaaccggatttatgaaaaacaaactataccaagctctattgcttatttttctggtagcagggataagttcttgcgactatttggacatcgttcctgatgaacgtccgactgaggaagatgcatttaaagataaaaatgcagctgaacgctatttgtattcttgttatgcttttatgcccaaagaacgcgaggggtgctatctatatcaaggaggtgattgtctcaccgattatgaccggaaatttcttgagggaacccataccgcggccaatataggtgatttcgcgtattggagtcgtatgtatgccggtatacgtcgttgttatacgctgataaacaatgtcgatgctgtgccacgtatggaagaagaactgaaaatcatatataaggcagaagctaattttttgattgcgtattatcacttcatgttactacgtgcatatggtccgattatcattatggatcacgaggttagtgtaagtagcacggagaaactgaagcgaagtccgtttgacgtatgcgtaaaatggattgccgacaagtatgacgaagcttgcaacaacggattgcttgccgttcaatcatcatcctactatggcagagctacacaactggctgccaaagcactgaaagcaaggctttatttgtatgcggcgtctcctcttttcaatggcaatagtttttatgccaactcatctctttacgatccggagacaaatgagccattgatgccgttggattataatccatctaaatggaatactgcgcttacggcttgtcaagaagcgttgacgctggcggatgaacagaaatacacccagtttcagattgctaatgaaagcgaaattcctgaagaatgttggcccaaggatttaatccaatatgctttgaagatgcaaattatggataagaaaaatatggaagtcatttgggcggatacccgtacggaaggtgtttatggaccacaaaaccaatccgctccgcgtgatccggtgaatggaggtaatagctggaatggagtaggtcctacattggattttgtgaaagtattctatacagaaaacggactcccgattgacgaagatccgaaatactacactcctgatgattattttaagataggacagtatgaaggacgtaccacgtgtaacctcaatttgaaacgtgaacctcgtttctattcatgggtttcattccataacggatattttgaaatgcagcgtgaaggatataatgaaggtagaattgttactatgttccgtaaatcagacaatcatggaaaacaaaaccgttctacggacttttcattgagtggatatttagtaaagaaatggtgcacgcctacttatgatacccgcaacgggttccagaattatccgtggcctgttattcgcttgggtgaactgtatttgaatcttgcagaagctgcagcagaagcaggtgaattaaacattgccaagacagcactgaacaagataagggaacatgccggcataccgactgtggaagaatcatgggaaggaattgctacgttgacaaaagataagctaattgaaataattcgtcaagaacgtatcatcgagttgagtttcgaaggacactaccgttgggacatggcaaggtggaaagaattggagcatgtcttaggccacaatccgtctgctcttaatacagatggtgtgtcggatgaggatttcttccgtccagtggtagtagatcgtgcttggaagttcacttcaccgactcattacctgcttccgattgcagattcggaattgaataagaatacgttgattgtgcaaaatccgggttattaatcattaaaatagcaattacgatgaaaaagaaatattttttcatggcatgtttagccgccatatttatggtatctgcttgtaacgacgatgatgacaaggcagctgtcttaccgtcggctattagcaatctgacagcaacgcctcttgaaggaggagtgctgctggaatgggaagttcccgtcgattccaacctgttctatgtacagatagactatactcatcctgtcacaggcaaacgtgtgaataagaatgccagtgtcttttgcgatactatgcttattgagggtatgttggcaaaagatggtgaatacacattccatgccacacctgtcagctcaacccaagatgtgggtgagaagttggaagtaagagcttccgcacttcctgtccagccggtggtgaaggaaatcactgataaaattttattaagtaaagacaacttgttttgtaataaacctgatccggatgaaggaaagtatatagagtatttggtggatggtaattacactaacttttttcatactgattggcatgatgcgggtactgttccgcactatatagatatcactcttccatctcctgtagagcagtttaagatacaaacttactatcgtaatggaaagtatggtcaatgtcctgtggagattaccgtattagggagtaatgacggtgaacagtggaacaagattgcggaaatagaagatgatggcaaaggtggtgcttcttataccacacctacgttggggacagaaggacagccttattcatacatccgttatcgtgcagacgagacttccggcaatgctgtgtactttgcgttagctgagttggaattctatactgtcagaactgagatttacgatccggaaggtatttaccgacccgaagacaaggaatagctgatatataagaataactgaaattattgcttattatttatggaaaggagggggcatgtctccctccctttcgtctaaacaatagaacttcatgaacaaattgataacatcgatcctcgtatgttgttttgcttttaatttatatgccgaacaacttcccgctaaacaattctcacatccggaacgtattcgttacgatcagcattgcttcacgatagaaggtcgggatatttttatcttgagtgcggcttttcattattttcgcgttcctcaggagttatggcgggatcgttttcgtaaaataaaggaggcgggattcaacactgtggagacttatgtgccgtggaattggcatgagcgcactatgccgcgtaatgtaaaggactattcgcaatgtgactttgacgacttgaaggcgtggctcaagatggctcacgaagagttcggactgtataccattgtccgcccgggaccttttatttgtgcagaatgggcaggaggaggttatcctagatgggttgccaagttttgtccggcaaaatatgacactagcttttggttacgaagtaaccatcccgaacacatgaaatggaccaaacattggtacgatgctgtttgtccggtttttgccgaggagcagcttacacgtaagaaatccggtgagaaaggaattatcatggtgcaactcgagaacgaatacatttactttggcatggagtcagagaaaaaagaagaggtgctgcgcgacatggcagcttattgcacgaacaatggaattgaggtaccgctgtttacctgtgttacacctgaggtaagaggctcgaaagatgccgttatcagtcagttgttcgatatggacaatcaatatgtatggtggaatatacaggaggcgaaaagccgcattgaagatttaaagagacaacagcctaacgcaccggcttttgtgtgtgaattgcagggtggctggttttccacggtaggtggaggattgagtgaggacagctatttggatggacgtcatgcgcgtggaatggcattgatggcaatggccggaggttctaccggacttaattattatatgtttttcggaggaacaaatctagccggttggggcgctcgccgcatgactaccagctacgattacggagctgcattaaaagaaagtggtggtgtgggtgagaaattcgctgccgtgaaaggagtcggggatttcgtcaaccgttttggtactcaattagcgagaagtgaagcgatagagtttactacatcggacaacatcaaggatttgaccgttggagtacgtcggacaaaagagggaactttgtttatttttatatttaataaagataagaaaaaagcattccgtgataatgttcaatttcatataaaaggtatgccggcattcaatgtttattgctcggttgagccattggacagcaaggtactggtactctctcaggcgaatggacaatgtgaatggtatccgaaagaacagactttgccggaacgtcccgtcaatatgcctatgccgatacggattgcacaggcagaacgttgtgatgaaacctttcaggggaactggcgaccattgcgtaaaggtgtttctttaccagaaattggtgtgaacgattgtcgttactccatgtatcgtagtgtagtaaaactatcgaagaaagagatagaggaatatggaacattggtttgtgagatgtttacggctgatccgctttatgtacaagtgaatggaaaaatagctaaaagggcttctaccgatgaactggataatacatttgtcatagatgggctactgcatgagggaagcaatgaaatcgtaagcatctatgaaaatcgtggacacgctcatggatatcgcccgatggaggaattgagcggaatgaaatctgccggattgggcaagaagcaatctgctatccttcctatcgaaaaatgggaagtgaaaaaggtggaaaataatgtcaaagatatcaagtcactgctgtctaacaatgaaggctgggaaaccatcatgcttgatcaaagtactatcgccaatcttgctacattgcaaatagccggactggagaagccggaatggcctgccgcatgggtgttgcaagggaaagaaggaacggctatttatcgtacttctattgatatgacacgtcagatgttgaccgaagggcaaacaatgatagaattcgcttgcgtagatgatgcgggtacgctttttgtaaacggtaaggaagtggcaagccacgatgcttgggacaaaccgtttgtagccaatatgaaagattttctgcatgaaggagagaataatgtggctattgtggtgcgtaatagtagcggtgcaggaggattgttaaagggaatccgcttgttcagtgaactgaaaatactgaagcctctgaagtgggaagtagcgcttgatcttggaggagtgacacaaggatattgtggagggaaaaccgccggcggtgacaattggaaggtggtgacattgaaaaccgatggtacattgcatcgaaaaggaaacaatatacagcctaaaggtaaacaagatgccttattgacttggtataaagtaacatttgatctgcccaaaacggaaaaagaatgctggattccttggagagccattatcaatgcttcaggtacaggatatatgtggttgaatgggcataatatcggacgttattgggaagaaggtccgcaacgggagttcttcttaccggaatgttggttgaacatgggaggaacgaatacattggtactcggacttcgacaatccgaaacttgcggggccgtgttggaagggatagaagtagctccttattatgaggatgcagagtttattaaataataattcaataggtatatgaatatatataaatcactttttttaggattggtgtgtagtgcaggaatgcactgcaccttcgctcaaacaactgtttggaatccggataatcagaatggaacatttacgaaccctatcatgtggggagactggcccgatccggatctgatccgggttgatgataagttttatctcgtgtctaccagtatgcactatgtaccgggatgccctattgctgtatcggaagatttggtaaactgggaaatggcaggatatgctttggatcgttatgatgaggatccgaaatatgatatgcagggtggcaatctttatctgaatggggcgtgggcaactacgatacggcatcataatggaaaattttacgttggtttctgtacaccctatggttggggacgggaaaccgggcatttctctatttgtatagccgatgatgtgaaaggaccttgggaacgtactatatttcctgaatatttatatgatccggggttattctttgatgaagatggaaaggtttacgtggttcacgggcaaggtacactatacttgacagagttgaactcggacgtgaaatccgttaaagggaaacctgtgaagatatggcagggtggttttaaaaatgcacatgagttaggaggcggtttcggtatggaaggatctcatatgtaccgcatcaatggaaaatattatattacttgtcctgccgggggaacgggaggatggcaaatctgcttgcgttcggataatatctatggtccctatgaacacaaactcataatgaacgattggagttcatatcccgaaaacggacttcatcagggtgggatggtacagttgaaaaatggagactggtggtttatgattatgcaggacagaggaccgataggacgtgttccgtgtcttgtgcccgtgaaatggatagacggttggcctatgctgggtgatgaaggaaaagatcttatcacttatcctaaacctgctaccgggaaaaaatcgaagataaagagtccggctactaccgatgagttcaatgcttctcaattaggtctgcaatggcaatggaatcataatccggataatagcagatggagtttgaaggaacgtaagggatatatgcgtctgtatgcttcccaagcttctacattgaaagatgctcgtaatacattgacacaacgtgttcagggaccgagttgcgagggttcggtagaaatggaagtgaccggacttaaagatggcaatattgccggattcggaatcttcgagtttccttatgcctatgttgcgatacgacaagaatccggtagacgcaaaattgtgatgtgtaatgacggtaaggatatcgaaaccgtagagcatttcaatggagataaactgtggatacgtgtacgtgctacagacaaagaatttaaggctttgttctattacagtctggatggtgtgaattataaacgcattggcaatgaattgcagatgggattgggattgccgtggacagccaatcgttttgcattgttcaacttcaatactacgccgcaaggaaataacggatatgccgactttaattggtttagatttacgaataagtaatgtatttataccattcaatcttcttaaaacacatgcaatgacatgaaacgaatatcactttttacttttttcatcttcttaggtatagccggctgtatggctcaagcatccggtgagaagatcgagaaagtttacgttgcattcaaaactcaccttgatgtgggatttactgatcttagttccgttgtgaccgaaaggtatgtgcatgattttattccgaaagccatagaagttagtgaacgcttgcgcgctgacggctttggtgatcggtatgtatggacaaccggctcatggcttatttggaaatatcttcgcacggcatctcctgaggctgtgaagcagttggaggaggccattggtcgtggtgatatcgtatggaattccgttccctatactgtggaatcggagacaatgacgcgtgaactgtttgaaacctgcttgttgctttccaaacgtttggataagaaatacaacaagcagactattgctgcaaagatgactgatgtgccgggacacactcgtagtatcatcgatccgatgtatgacgcaggcattcgtcttttgcatgtgggaattaattcagcttgtccgttaccttcggtgcctactttctgtcggtggcgcagtccttctggtaatgacttgttgctggtttatcagaaagattatggagaagatgaagtattgccggatggaaagacagttgtcagtattaattttacgggcgacaaccacggaccgcatagctatgaacgtgtgaaaaagatttatgccgatttgcgtaagcgttatcctcaagctcagcttgtaggtgcatcgttcaatgatgtcgcccgggaactgttgctgataaagaaggatttgccggttgttacttctgagattggtgatacgtggatatttggttatggtggagcaccgatacgtatggctaaatttcgtgctgtttcgcggttgtattctcaatggttgaatgaagggaaaatcaaaaaagatagtgacgttgctttggactttgcagccgaattaggtctgatagcagaacatacgcaaggtgtggatgtgaaaacacatcttcgtcaatgggacaaatatgatatggataagtttctcaaaggtcgttccgaaggagtattcagtatggctgaggcttcatggaaagagattgataattatatcgatagtgctatcgctttccttccggcttccttgcaaaaagaggcgcgtgaagtagtcgcagaagtggataaggttaaattggaggataactcaaagatgaaaccaatggcacggaagcgttgggaacaaccgatagccggtggaatgacgttggcgggattgtcttatcaaatgtttgatgggggtgattatgatgattttcaaaatagatatcttcgtgcacggtatggatgggcattggatgacttgggtaaacgaggtttgaaagaatcacatgcagtgagtgtaacgctttatgcacagacaatggcgcaatcggtacgtaaagagaaaaaggggacacgtattatcactgaactgaggtttcctgaaaatgagaaagtggacaaacgcgtatatcccgaacgaatacaggtgaactgttttacgacaaagaatgggaaacggtcggaagtggcattgaccatttatggtaaaccggcagtacgtttgcccgagtcttattggttgtcgttcacggtgcccggtattgaatcggtgatagccgagaagatgggtgaacgggtggatttgatggatgtggtggaaaaaggtaaccggcaaatgcatgggatagaccgttatgtcgatttgataacctccggggaaacgatacgtatcagcagtaaggaagctttcttactcaacgtaggagaagctcagggattgaattattcaaccaactatcctgataaacgtaaaggggtgcattttaatctgaacaacaatttgtggggaacgaatttctccatgtggaatgaaggctcgctgacttatcattttgtgattgagacattgaatcgcaaataaaggaaagtacttgaataaccttattttataactaaaatgattttaaaccatgaaaaaatatagtattattattttgatattatgtagctgggcgatgagtctgtttgctatatcttgttccgatcaggaaagcaaaccgcaaccttttttggaaataaagaaggacactgtggtgtttgcacaagaggctgcaaatacttctattgtagtgaatacaaacatcgcttggcaagccaatgtgtcttcatccgggaattggtgtacggttcagggagcagatgatttgttgtctatttcggtagaaaagaatacgggaagggacttgcgtgaaacagacattgttgttaaaggagaaggccttgaacaaaaagtgcacgtgaaacaattgggagagcaaccggatattttgttggagaatgagcgtctcaacttgaactatacagatacggtagttaccgtcaaggtggtaagtaacgtagaatatgaagtggaaattccacaaaacgctgattggattaaggaaatgaagcaacaagtacaggtacgggctatggcggaatcggaacgtactttcaacattgaaagaaatgaagatgatacggtgcgctatatctctgtcgtattccgttctgtggatcagaaggtcgaacgctcattgatgtttcgtcaaaggcagcgcgacaaagaatacaagcccggtgatccgtctgaactcggtgatatattcttgcctatcgctagtggaaaggcaagtgaatataattcggatgatgagagtattgaaaagtcatttgacgggactgcgtccacttggtatcactcacggtggtacggtacagttttgcctgtgaaacttgagtacacttttgaagctcctcaagacgtggattattttgtatataaacctcgaggttcaggcgataatggtaattggaaaaagttcgacttatatgtttccacagcgcagaaagaaaattatgaaaagatagcatcgtatgactttgctggtagttcttcttcgtcgaagataagcttcgctgaaccgctgaagggggtaaagtccttccgatttgaggtgaatgaagctgtcggtggagtggtgagttgcggtgaaatggaattttataggaatgctgctcctgtagcaggacttacggaagtatttgccgacgaactctgttccgaacttcgtgcagatgtggatcaacgtaagatagatggattggagaatagctttttcagaatgatagcgcaaagtttgtatgacaagacctatgatttggagtaccgtgtgcaaacttatgaaccttatcgtgaaattaacgatttggcggcagaactgaaaactagtgggtataatccgtttgagaatcccacaggtatttattttaaggatggcgaggaggctgtcgtaattttaggtaataccaatggagaacaagtgaatttgaaagtgtacgatttcgatgcaataagacaaggacaacgtacaccggatccaacttcatatcctttaagtgagggtattaacaagttgaggattgcacatggaggattgagttatattgagtattatactccgaattggaaaactgcaccagctcttaaattgcatatcgcttccggtaaagtgaacggatattacgacaaacatcgggatgtatcggccgactggcgtgaaattttgaataaagctacttatggttgcatagatatcaaaggcgatcgtgttaatctggtgtttggggtgaacagtataaagacttattgtgacaatctaggaaaattgatacagaactatgacgatatagtggaattggaacatgaactcatgggattagataaatgggggcgtcggcctaaaaaccatatgtttgctcgtgtaaccaaagacggattgtttgctgatggttggggagccggttggtatgaaggctgtatgaacgaattggccagcaccactaaatctttgcgtgaaggagtttgggccattgcgcatgagttcggacatgtcaatcaaatcagaccggggttgaaatgggtatcaaccactgaagtgacgaataatgtatattctgtatgtgcacgatataaattctatcgggagaatatgccgttggaacgtgaaaggtgtaacgatggaaatgataacaatgtcctgggaggacgttttaattcatatctcaattatggtatcatcaaaggggaacagtggctctgtcaaaagggacaggataatatggatccttctaagtatccttacggaggcgatcactttgtgaaactctgtccactatggcagttgctgctctattatcgtgagattgtgggaggagaaaaacgcgattggtacggtgatgtggctgagattgtacgcaatacggatgaatcacaattgactaacgggcaactccagctcaatttcatgcgcaatactatggatgttgtgaaagaggatttgaccgacttctttatcaaggcaggtatgctgaagcctattgataaggaattggacgactatgcacgtggacaaatgactattacccaaacagattgtgatgagttggtgaagtatgcttccaagtattctaaaccggctactcccgtactttattatttatcagccaatagtcagaagtcatttaaggacaaattggcggtagaaggaacttataatgaaggtgtcaaggtaagaaataatggttggattgtcatcgatcacgatgtgtggaaaaatgccgtagtctttgaaacctatcagggagatgaattgaaatatgctgccattgtgggaacagattctcctgacctgagtgaaacaaaggtttgttatcccgaaggttccacacgcattgaggctgtttcttgggatggaacaagaactttggtctatggaaaaaaatgatatcggattcaataagatataaaaagatcataacaggactactcgatatcgtttaccgaattcggatacatagaaagtaatctctaccggaaacagggataagtaactgattgattggttcttcttcaaatttgaagaagaaccgattgatttccaattaaatttgatatatcctactgacagtcgttgtacttatatgtggattaaagaaggaaaaagactgaaaccgtttatggataatattaagatttctaactggtaaaaaataataactatatggtttgtatttaacttgttttattaaatgctggaaatgaacaatcgatactttactaaagttttattatttggaatgataataataacgacttccttacaagctcaggtgattcctccttatttaaacacagatttgtccattgacgaacgtgtcaacgatttggtatctcgtatgaccttggaagaaaaggtgtctcaaatgacacatacttccagaggaattaatcgtctgggaattcctgactataactggtggaatgaatgtctgcacggtgtggcacgctccacagaaaaggtgactgtcttcccgcaacctatcggactggcagcctcattcaaccctgaagaactattcaaatccgccgaaatgatttccgacgaaggaagagcagtatataatgcctctgtaaaaaaaggaaatacccttaatcgatacacgggactaacgttttggactcctaatgtaaatatattccgtgatcctcgttggggacgcggtcatgaaacatacggtgaggatccatatcttacatccgaaatgggaatatcaatggttaaaggattacagggaaatgattctacttatttaaaagtatccgcgtgtgctaaacattttgctgtccacagcggcccggaaccgttaaggcatgaatttaatgcaactgccagcgaccatgatttgcgtgacacctatttacccgctttttatagattgataaaagaagcagatgtttcaggcataatgtgtgcctataacagcttcaacgggcagccttgttgtgggagtaacctgctgctgagaaaaattctacttcatgattggaaatttgagggatatgttacttcagattgttgggctattacggattttttgtacgggcataaaacacatacggattctatatctgcttcatcagatgcggtattacatggaacagatctggagtgcggggatacttaccgttcattaccggcggcggttaatgcagggttgatcactgaagaacagattgatatttctttaaagaaactgttgaaaatacgtttccgcttaggtatgtttgacccttcatgcaaggtgccttattcaaatataccttatgaggtgcttgaatcccgggaacatcaggaacaagcacttaagatggctcgccaatcaatggttctgttgaaaaatgaaaagaaagtacttccattgtcgtctaaaataaaaaagattgcgctcattggtcctaatgctgataaccggataacacaacttgggaattataatggtattcctagtcgaaacataacccttttggaggctttacgttcggaaaagggtattgaggttatatatgattcggtatccgactttgttaaattgaatgagggagtagacttggagcgattagccgataaatataaagatgttgatttaataatttatgtcggtggcatctctccaatgttagaaggtgaagaaggagatgccggagggcttgaaggatttgtgggaggtgataggactacaatcgctttaccggctattcaaacagaagtaatgaaaagattgaatctattgggtaaatcattaatatttatctgtatgtccggtggtgctatgtctttcaattgggaagtagaaaatttgccggtcattattcaagcatggtatggtggacagtctaccggtactgctttggcagatatattgttcggccgttataatccttcaggaaaattacctgtcactttttaccattctgatgctgatcttcctcctataaaagattactccatgtcgaacagaacatatcgttattttggcggagatgtgttatatccatttggatatggcttgagttatacatcttttaaatataagaaattggaatgtccttcagaagtacaaatcggtgataccttaaatgtaaaggttgaagtgagcaatacaggcaaatttgccggtgaagaggttgtgcagctctatttatcgcataaagcaattgctcaggaagctccactttgtcaattagtccgttttaaaaaggtaaatcttaaccctggagaaaacaaagttgtagagttcaagctttctgcaagagatttagcatatgtagatgagactggaggtattggcactgtgcctggaacgataactgtttatgctggaaatgtttgtccaagtgctcccaaaagatttacttctaagattttatctgaatcgattgggctaaagggaatccctaaatatttcttatattgatatcaacggtttattagactttatcttaaattgaaattagatatgtatgtgtataataatgtaaatttatatattccttgttgcaattttataataaaaagactgcttcataacaggcggctttattttttattattgctatttgcgtttagcctcgggactccggggcttgcgcagaagcgttgtatcagtctggattggaatttttgtcgtatttccgatgaaacgtcgaaagcggaaatcaagaatcagggaagtgactggagttcacaatacaatgtgcagcacatggatatgaacgggaatagcgaattgactgttccgcaaaatactttgggagcggaactgcggcagttggagaacaaacaatgggaacaaattactcttccgcatacgccatttgtagaaccattgactgtgctgcatcagtggcaaggtatctgttattacaaaaaaaagattaccattacaccggaggaggcgaagaagcatatttggatagagtttgaaggcgcgatgcacttggccgacgtgtggattaacggtaagcatgtcatgcaacatgccggaggatacaccccatttgtggtagacgcaaccggattgttgaaaacgggtaaagaaaatgaattattagtccgtttggacaaccgtaacaattcgttgattcctcccggaaaaccgttggaaacacttgatttttgttattatgggggaatttatcggaatgtacacttgatagcgaaagctgatgtacatattactcatcccattcttgacggacatccggcaggagcaggtatatttattacctatccgaaggtgtcgcaggagttatcggtagtggatgcgaaaactgaaataaagaatacttctgataaggaaaaagtggtggaacttagacacacgctttatacttggaaaaagcagaaaggaaaggataaaaaagtacagaacatttcagaaacactcacattgcaccctggcgtaacaatagaaaacaaccagcgcatggaggtgaaacatccggctttgtggagtccggatgaaccgaatttgtatgtgttgtcgacagaagtcgtagaaaatgggaaagtggtagataaggaagaaactcgtataggaatacgtcatatagaaatgagtattgaaaaagggtttgtcatcaacggaaaaccgcttaggttggtaggtagtaaccgacacatggaatatccgtatgtaggtaatgctatttccgatcaggcacaatatcgtgatatgtatcaaattcgttcaaacggattcaacattgttcgtttgggacattatccgcaagctactgctgcattggatgcttgcgatgagttgggacttcttgccatagaaccgatacccggatggcagtttttcaataaaaatccgttgttcatatcgctcacgcaccgggatgtgcgtgacatgattcgtcgtgatcgtaatcatccatccattgtgatgtgggaaacaacgcttaatgagtcatggcctccggccgagtggaaagacggagtagtcaagattgcccatgaggaactgccgggagatcaatgtttcacatcaggcgattcgtatggttataaaggatttgatgtctgttacaatgactgggaagaaggcttcaaacgtcccaataatagtggtaaaccgggatttatacgcgaatattatgattatgagtttggcgggcattacagcacaacacgtatcagacggggagacggagaaaaggctcaacttcagaacgcatggaatgcgcaatggtcgcacaaccgataccgtatttattatccaaagacaatgggggatgcggtatggagtatgtatgattacaatcggggatgttgcgataatatttgttatagtggtgtggccgacatctttagattacctaaattcagtctttcttttttcagaacacagattgcggaaggtagcatgctaccttcgggaaagatgccttatgaggtatttattccggcgtatagggacgaaattttatctgatacagtaatggtgtacggtaatgtggatgaggtagaactggttttaaatggcaaaactatcagacggcaaacagctgacaaaggcccggatagtgactatattcccgtaccgaatggaggcaatggcaagaatcttcatttcccaccgttcacgttttatggagtacctaaggagagaggggtattgaaagctgtcggttatcatcaagggaaaaaagtggcagaatatacggtgaagactcccggagtcccggaacgtctggatattacttattttgagagtggcaaaccggctacaaagaatgacttgctgattgtatatgtcagaatgctggacaaacaaggagtactttgtcctgttaacggaattcctgtagaattgtcggtacaaggaggagaaatcgtaggtcctacttcgtatccactggaagcaggagtcgcttcatttctggtgagaaccggtgagatctcgaaaatcaatataagggctacaagtaaagagttttcaacttataaaaaaataaagataaagaatagtttatgaatttaatgaaggttattgctacttatgcaatgttatgtgtgtgtgtcttagcacaagccaaagaggtgaagtctttgcaatcacctcggcagtggcatgtttctattagtggaaatgatagtgccgatggctctgcgacagctccattgcgtcatattcagactgcggccgaacgggcatacccgggagatgttgtcatcgtacacgaaggtgtttacagggagagagttgctccaccgcggggaggagaatctagagagcgaccgataacctatcaagcggctgaaggagaaaaagtggaaatcaaaggttccgaagtcattaaaaattggagacggctgaacaatgagacgtgggaaacggcgatccctaatagtttgttcggcgacttcaatccgtacaatgatacgatacatggtgattggttggcaagaggacaatggtcgcataccggagaagtatatttgaatgaccgtgcccttgcggaaacggaacggttggaagatgtgcttctgaataaaggtaatcgtcagttgtggtatagtaaagtaggaaatgacagtacatggatatgggccaattttccgggatgcgatccgaaccgtgaactggtggagattaatgtacgccggacggtattctatccggagaaaccgtttgtcaactacattacagtaagaggttttcacgtcagtcaagctgctacgccatgggcaccacccactgctgaacaaataggggctatcggtacacattggagtaaaggatggactatagaggacaatgtggttactcattcaaaatgtgtgggcattactttaggtaaatacggagatgaatgggataataaggcagaaagcgtagaaggatatgttggcactgtcaaaagggcattggacaaccaatggaacagggagcatatcggcagtcattcggtacgccacaatcgtgtttctttctgtggacaagccggtatcgcaggtagtttgggagcaatcttcagtaccattagcgacaatgtggttcatgatatcggaagttcttcattttggggatacgaattggccggtatcaaactgcatgcggctatagacgctgtgatagagcacaatcacatttatcggacggagggcggcatttggctggactggatgacacaaggtacaagggtgacacgtaatctccttcacgacaacagagtacaggatttctccttggaagtgaaccacggtcccatcattgtggataataatttatttttgtcgcccgaactggcgcaagtcaaactttcacaaggaattacttttgtacacaatacaattgcttggaaaatatggcctacaggcgatgtggatgaacggcaaactccttatatgtttcctcatgacactcaaattaagggataccatgattgtccttgcgggaatgtgtgttacttcaataatttgctcttacgggaaaatttgagtatgtacgagaatagcaaattaccgacaaagatggaagggaatgtagtagatacactggtgcaatatagagtagaagaaatggctgatggttggtatctggagttcatccctacgaaatcattgagcaaggaatgtactaaagcattggtctattcgcagcaattgggagaagctgttattccccgacagcggattgagttgccggatggaaagaaggctttcgataaagactatttggggaggaagcgtaaaaaaagagggaacttacccggcgctattgaatttaaaggagattccagggtgcgggttaaggtatatgatacatggaattaatatcatcagtaactatgaagaagcatgttttaatctgtggattaggaatattattgggatttttgctaaatacaggtgtcttggctgccgctaattcttctatcggtcgttggactatctggtcgaagaaccctgcattgcaatgggaggacgctttcgtgaccggcaatgggaagattggcagtttgatagcgggacgtccgcaggaagaacgaatcacttgtgttcatgaagaattgtttatccgcggatgggacaggcataaagtgactgttccgcaaactgcacaattgatgccatacgttcgtcaactaatggaaaaaggtaaatcggatgaagcggcttggctgttgacggatgaggcagaaagacaattgcgtgcaatgggagctaatcaacgatggccgttaattccgcatccggctttcgatctttgcatccgtcagttggacaagttgcctcttccggtagcagattaccggcggcaattgaacttggagacgggggaagcgactgttgtctggaagcaaggtgccggcagttttacagaatcggttttttcttcaaggaaagacaatgtgaatgtcattcgcctgaaagcaaacaacaaagggaaaataaatgtggaacttagtctggaggaaactcccggacgggaaggagaacactttgaacacgatttggatcatgccttttctgaggtaaatcgggaagcttccgggcattggctcacttatcatgccgcatacgacaaagatcccggcggatatgatggagtggcgaaggttactttgagaggaggaaacatacagacgaaaggtaaatcgttggtagtcagaaatgcagaagaggtattaattatagtgagtattgtcccgcaggaagatgcccgaaatgcttcgttggatgctgtcaaagccgggctggataagttggctacaaactatgacaagttgttgcggcctcatgcgcaaaaacacagcgaactatttcaccgtatgcagttggatttaggttgtggtgaacaatggacagtgacgcctactgaacagatgttggcacagatcaaagaaacagggccaacacccttgttccttgaacaacttcatgccatgggacgttatctgttgatttcttcgtgtggaaaattccctcctcctttacagggaatatggagtggaggatggaaacctgcatggattggaggcttcgtctgggattccaatcttaatctggctatatccgccacaacgatgagcaacctgcccgaatgtgccgaaagttataaccgacacatagaaagcctgctgccgggatggcgactgaacgcccgcaattatttaggttgccgcggctttgtcgttgctcattacaatgatcctaccaatggctacctgacacacttcggtagttcctttccatggatgttttgggcaggtggggcaggatggaatttgcgtcctttgtatgaatatgccatgttgaccggcaatgtgacatatctgaaagagaaagtctatcctttatataaggaaatggctgatttttacgaagactatttggtggaaggtactgacggattatatcatatcacaacctctatttctccggaaaacgctccgaaaggtacgaatacctggctaagtaaagatgctactatggatgtggcgatagcccgtgaagtgtttactttcctttgtgacatgggccgacgtttccatgcttcttctgctgagatggaaagatggaatgctatactgcagaaattgccggcttaccgcattaacaatgacggcgctttggctgagtgggtggatccggcttatcccgatatctataatcaccgccataattcccacctttatcctgtcttcccggggattgacttggttgggccggatgccgatcctgcattgcagaaggcggcaaaagtggcgttggacaaacgtttcggatttgatacaagttctgctcacggtttgattcatctggcgcttcaggccgcccgtttgggagatgcggataaggtgcggcaaaacatagagcgttttagtaagcggaactatctttacgacggattaatcacttcccatgagccgggacgtgctatcttcaatctagatgcgatattgagttttcctcgtttgttgatggagatgttggtgtttacaaaatccggatatatcgaattcttgcccgcctggcccgtcggatttcccgatggttcgctcaaaggaatgcgtatttatggtgggcacacactggacatctgctggaaagcaggcagacttgaatcgtttaccattcacgctgttgctgatgagactttggaatgggcacacgatgggatgaaagaatgtctggaattgaaaaaggataagccgtttcagtggagacggcaggcggtcggggctcaaatgcagaggatggagtctatgtatgatgaacaaaaagacgaaacgtttttcgccggaaagcgaaacttgctgactgccaaatgggaagaacctttctcttacgaaagtatacggagcaagcatgcacctatgggaccttttatgggcaatggagatgtgggatgtgtcagccatacaactgccaatagccagaccatttgtatatcgaaagtcgatttcgtgacggatggttgggaggattggacgggcaggggaccggcggcccttccgataggaggaataaaagtatcggttgatgctccttctgccgaagggttccgttacgaaatggatatgttgggtaatgaattgcgaatgacaagcgggacattgccggctgtggagatgacaagctggatgggcagaggctccaacgtgatagtgacggaacttgtcactgcttccgaacaccctgttaccatcactgtagatacttatgcaggcggaacaacttcaaattatgaggataaggcgatggtgaaaggtactattgcccaagcatatcgccggacgttgacagacagtgtacgttggatttcgcaagcaggtgtctctacccgtattatcggggcagtctcgtcggtgaagcaggatgcagaaaacaatgtaaaaagtactttcacgttgaatgcaggtgagaaggtgtatgtagtcacttatgtatcgggcggaggtactgaagataacgcgcgtcttgatgaagcctacgtccggttaacctctttgtcggtaaaagatctccgtcggttgaaacagcagaaagatctttggtggacagagatgtggcgacgttcgtatgtggagaccggcgatgacctgattgacaggcaatatcttgtctctgtctatttacaggcttcggcttatgacgaacactctcctgcttgcggaggaatgtatggtgtatggaatatggatgacgaaatgaactaccacggagatattcatctgaattataatagccaaggtggattttacagtatgttttcatctaaccgtcccgagcttgccatgccctactaccgttttcttgaagggatgattccggagggtagaaggcgggcaaaggaagaattggaactggtacacccttcgctgaaaggaaaatcgtgcagggggcttttatttcctgtcagtgcgttgggaattggtggcttttattgtacctactggcagcaaacagtcaatgctcctttcaatgtaccgttgtttagctggtattacgaatacaccggtgatgaaacttttctacgtgaaagagcctatccttttatcagggagtgtgggaatttttacgaagattacattcaaaaagaacgatacggtaattcctaccgatatacgattaccaccgggggacatgaaaattcgtgggacctgaatccgccgtcggatgtggcttttgtggaacagacattccggcttctgctgcgctatagccaaatcctgaacatggatgcggacagacgagacaaatggcaggatattgtggatcatcttccggactacaaagtgattatgcctacccgacaaccgaaccagggactacctgtttatgccaagaatgaagccggatgggatgcgccgaatcacatgatacagttacatgccgcttatccatgtgaagtcttgaatctggcatcatctcctgaagctcttcagattgcacgcaatacggtccactattattttgtggcacaggagggctataaactcatgaacgaattgggcttgagtgcttatgtgatgggagcccgcgtagctttcgacccggaaatacttatcgacaagatgaggtatcaagctgaaactgcgggaaagaacttcttgattacggatgggcaccattgtctggagaagagtgcgattatggaggcggtacattccatgatgctacaaacggtagatgatgtgctttacctttttcccgactggatgaagaaaccggcatcctttacacgtcttcgggctaaaggaggttttcttgtgtcggcttcgtatgatggggctcaagtgaccgagttgaaaattcaggcaggcaaagcacctgtttgcaagatccggaatccgtggccggaccgggagatagaagtgacagctaatggaagaacagtgcctgttactatatatcgtgattattgtgctttttctgtcagggagaatgaagtctatcatgtagtatgcaaatagttccttcatccttattgttgcactctggtaaacagatcggtgcactcaggtggatagccctattcacttcagtgcacaagcctgttcactggagtgcaacgataaaggtttcttattgaaaatcgactgattatggtggtataatctttcattgtctgttagttatgatgagaatgaacgatagttttgctacagttcattaagcgttgatgattaagttatgagaataacatttgcaataggtcattttagcaagtcgatgatatcagtttttcaatctcttttgcagagtccactatatacgccggattaaacttttccaattctgttcgaggtcggaacccccatgttacaccacaggctgttacatttgcattagctgccgtttgcatatcgactcctgaatccccgacataaagaacattttctttttctacatcggctaatttcaaaatatcaaagacgactgccggatcgggtttgacgttcactccttcccgttgaccgaaaacggcagtgaagcggatctttgggaaatagtaggctatcagtttctcggtagctgcctgatatttgttcgaagctactgcaagctgtataccttcggattgcaaataggataaaagttctgaaatacccggataaggacggctgtcatctgcattgtgaacgtcatagtaaggaatgaactcctttcttacacggagtacattttcttctgttttttctccttcgggcagagcacgctcaaaaagcttgttgataccgtttcccaccataaagttatacttctcaatgtcatgggtaggatatcctaatttgtttaatgcgtaattggtactgtgggccagatcggcaatggtgtttagcaatgtaccgtccaaatcgaatataactagtttcttcattgagctttctgttttataattaatcttgctatcttggatcttttcgtttacaaaggtagaaaagaaaagacgctcctgcaagatttttatgatgcaggagcgtctttttgtatttggttactcttttttatttctttgtaatccgaaaccaatccacatctgcccaaccgccgtcgttagtaacaatggcaggacgagtacagaacataccaaccttggcaccgatccattgtccttctcttgcccggaaaggagcaccgaatgattcaaactttttcccgtcaaggctataactgaaattacacattgcaatgaggtcgtgcccgccttcactgctcttgattttctttccgtcacaactgaaacgtaccttcagataaaccgtattttgagaaaggggaacggaggctctcacttcttccggttttcctttatccgctcttaggcattcaacttgcgacagcacaagacctttatctgtattttcaagaatcagtccggcatagtccctgcccataacgacaagtccggtacgttcacccttgtttttcaggttagggctgaacgtcagcttcatcgttgcgctgaaattatcggaagaggttttctgtagcaagaggttagctacatcccacaggtttttatactcttctaccaccgggtaagagtataacctgacatgacttttgtctcccgcataatacgcccatttttcgttgatgttagcgtgccattgccattgtggcgaaagggtataaccgtcaaactcatcactttcctgtggagtacaaatgggatatgtctttcctacattcggtttcctgtaagtcaaaacaggctcaccgcaaccgtcaccgtctttgtctgttccgatgacaggccagtcgtttacccatttcatcggttgcagatgcatgatacggccgtaagcgcctacatcctggaaatgaaggaaccagtcttctccggtaggggtgtctacccaagctccctgatgaggcccgttgacgggagagttgccttgtgccaataccgttttccactcgtaaggaccataaatgtttttggaacgtaacacgacctgccagcctgtcggtacgccgcctgccggatgaaagatatagtaatagtcatttctcttatacattttgggaccttcgcaagtctggtgtgcctcgtgtccgtcaaatatgatacgggaaggagtggttgctttcgttgcctctgcattcagttcgcagattgtgattacacttttcagtccggcacgacttcctgcgtatgcatgtaccatatatacttttccgtcctcatcccaaaacgggcaagtgtcgataatcccttttcccggctttacaagaacaggctcactccatggacctttcggatcttttgctttcaccatgaaagccccttggtcagggtctccccaaaaaatataaaattcaccgttgtggtaacgaatggccggtgcccatatacggttaccgtgttccggtcgttccggagtttcaataggagtaagggcattggggatggcagcgccgataattgtccagttcaccaaatccttggaatgcagaatctgtaatccgggcaggcagttgaaactggatgaagtcatatagaaatcatctcctacacggcaagcgtccggatcggaataatcggcatagagtaccggatttttgtatttgccgtttccgagatcggaaacccatacttcggatacatagtttttctgtgctactgcggtgaaagccgtaagcaggcagaaagctaaagtctgtgtcaatcgtttcataatccctatttagttatacagatatccttaattttcacagtgacgggatgtgccagttcttctttccattggcggagataagcaaaccacgcttccggggttttatatccgaaagtttctttcatggaagtgaacgtggtgtgataccggaagtagttacttcccggagcagtaattgtataaaggaagttcgctttatctttctcctccgatttcacataacgttgaggaatgcaggtgccgagtcctactgtttctttggcatatttcactgtatcgtttacgggccagtccgtaccccagcttcctacaagaccttgatggtcggagaaagatttggaattacctacaatatcctgaactcctgtgcagaatatctcttttttgagcggttcgtcaaagaaagcctcgatacggagatctcggtgtccggcatagagggtataccgtgtcgtcatatccagttccgagccttgatattgccagccggtcacttcgatttctgcaatgacacgtaccggtccataggagatgatacgttccgtgcgggtctccaccggagtgacgtgtattgctttctgtccatcccaacctttcaaggcacccggaccgcagctgtcaaatacccgcagcacatcatccccgaatcctttggttagctgttcatccgtaggatagaattgtgattccttgatttccagtcctttgttgaatttgccatatatatccggcgtctgcttttcattgaaataaagacgatagcctactaactccgattccaacaccggaccgtgaggacgtaccatactatatatattgctggtaccgggaacggtaatagcctgtacccgttgatgtttccctttgcggtggtctgtgataaacatatcagcataaacccgttcaggataagtcttcgtgctcttttccgaagaaagagtaatccggaatgtttttctgctctgggcagggagttcggtaacgaatgccaattcatccattttgtggtccctgttcaagtcatccagttgggaaggtatttcatcgcttccttccatgactacggcagactttaccttgaaccccatttgaagctcgcgtaggctgatcactaccggtgcatccgtttgtggttggttccagttattatgtacctctatcgtaatcgtcttttcctgtttctgagccaaggtgggcaggatgacgctccctaaaaggaaagcgataataagaatattctttttcatgcttctaaagctgatattatacgttgtatttctttgtcacaaaagtaacggaaaaaatagcagaccgtctatcttttaaggataaaatagtctgctatttgagctttttactctatataatgatattgtggttttcttctttttttctggaatgtatcttatttgaggctcagaatctgtccttttgcacccagttcttcataaacttttccgtcgacagtcaggtttttggcattcttgacatttaatatattgttaccctttgccgattctacataaacgttttctaaagtaactccgtctacctggctgataacaactccatccgtagcttccgtcataacaacgtttttaaccgtcacattgctgattggcatttccggaagaccgttgaagaacatcgcacgccccgaacctctgcaaacaatatttgaaatatgaatattgcggaatgccggagtttcttccgttaccggaggaatggcagtcttcatacgattcagcaaatcttcttccgattcttctcctgcaccttttccgccgtagaacaaatcgaacaatagcggctcgttcggtatattaatcatgttgatgttattaatgtagatgttttctaccacaccgccacgtccgcgagtactcttgaagcgcaaacctacatccgtacccatgaatgtgcagtcttctacatagatattcttcacgcctccggacatctcgctacctaccacgaatcctccatgcccgtgcagtactgtattattcttcacaatcacattctgacaaggttctccgcgacggcgaccatcttcgtctttacccgacttgatacaaatcgcgtcatctcccgcatcaaatacgctgttgataatcagcgcattcttgcaagattccaaatcaatcgcgtcaccattctgtgagtaccatggattgataaccataatattattaaccgtgaaatcttcgcaggacaacggatgcagacaccagctcggagagttcttgaaagttacgccttccaacaacactttcttgcttttcacaatgctgagcaacaccggacgcaaccacggacggatctcagcccattcttcatctgtattaatcccttcgggtacgttgaaatctttgcaagccatagcccctttcagcgaacctgcggtgggataccatatctcctgtttctcatccaggacaccgcccgaattgaccagtttcttccactgtgaagcagtcagtttctctttcttcaccggacgccagcaatctccgttaccatcaaacgtgccatagccggtgatagcgatattctccgcattccgtgccgagatcggtgactggcaacgacgggtttccaacccttcaaaagaagtgtcgatgataggatatgcttcgaagtcgcctgtgaaaagtaccaaagcattctgttctgtataaagattcacattactcagcaactcgataggaccggtcaaccagataccttcagggataatcacttttcccccaccacgttggttgacgtctttgatcgcatcattgatcgcctttgtattcaggaataatccatctcctttggctccgaatttttcgatgtttacctcataagcaggaaaagccggttgttgcacttcgggcatttcaaaaggtaaattctggtaaagtgcgtcgcttattgcgttcttgcttactgcattctcattgggttgtttacatcccgagataaacggcaaacagcatacggctatccagaggagtctttttgtcaatgtgttcatttagtaatctaattctatagggttatacatctattgtttttcttggtatattgttgatattaataaggatgatttcataattcttatgtccctccgcaggcgatctttcgcaggcagcctgccggagcggaataagacgaattcatgttaacctaattctaaccttaaataaatattatgaaaaaacctcttaattatcattcgcaaagataggtgggaaacttcaagaggatgtggactaattgatagattacgtgtattttttgtcatttctgtctattatttgcacacatctcgtgtttttatgcagaaagttcctatctttgcacaaaatttaacgattaaaagatatgagttataacttgttgaaaggaaaaagaggtattatcttcggtgctctgaacgatcagtctattgcctggaaagtggcagagcgtgccgtagaagaaggtgcaacaattacattatcaaatactccaatggctatccgtatgggagaagtcaatgctttagcagagaaactgaattgccagattgttccggcagatgcaacgagcgtagaggatttgtcgaatgtgtttaagacctcaatggatatactgggcggacaaattgattttgtgctccactctatcggtatgtctcccaacgtacgcaagaaacgtacttatgatgaccttgactatggaatgttggataagacattggatatttcagccgtttcattccataaaatgattcagtcggccaagaaactgaatgcgattacagattacggttcaatcgttgcattgagctatgtggctgcacagcgtactttctacggctacaacgatatggcagatgcaaaagcattgctggaatctattgcacgcagcttcggctatatctacggacgcgagcatagtgtgcgtgtgaatacaatttcacagtcgcctacattcactaccgccggttcgggcgtgaaaggtatggataagttgttcgacttcgccaaccgtatgtctccgctcggaaatgcgactgccgatgaatgtgcagattattgtatcgtgatgttctccgatcttacccgtaaggtgactatgcagaaccttttccatgacggtggtttctccagcgtaggtatgagtcttcgtgcaatggctacctatgagaaagggttggatgaatatatggacgaaaatggtaatatcatttacggataaaagattatgaaactacggatttctcttcttgttatattaataagtatgcttttcgcctcctgcgggataagcacaggaaaaggtacggagcagaaaggagaagagatttctgttctgagatatgataagctgttgaacgaatatgttcgttccaacagcttttctgctatgcagaagctgacaatggattaccgccagccgacgaaaattctgattgaagatgtactggctatcggtaccgtgaaagacgataccatttttcagcgtcttcaaaaattctattcggacactacgttagtccgcttagtgagtgacgtggaagctaagttccccaatcttgatgaagtggagaaaggactgaataaaggattccggaaactgaaaaaagaggtccccggtacgaaggtgccgtttgtctattcgcagatatccgcattcaacgagtctattattcttgtagacacgttgctcggtatcagcctcgataaatatatgggggaagattacccgctttacaaacgcttctattacgattatcaatgccgttcaatgcgtcccgaacgtattgtgccggattgttttgtattctatctcctcgaccgttacggaatgagttatcacgaggggacttgcctgattgacctgatgatgcattccgggaagatcaattatgtagtgcagcatttgttgggttatgataatattggtgatgcaatcggttattcggatgaggaaaatgcctggtgcaagaaaaacgaaaaggctatttgggaacatatttgttccaacgatcatttgcatgcgcgtgacccgatgatcatccgttattatatgaaacctgcccctgcagttgaaatgctgggtggacaagcgcctgcatcagtgggtatatggataggcgcacagattgtttcttcctatatgaaaaagcataaggatatgaagctgaaagatttgttggaatttaccgactatcacgagatgttgaaccagtccgattatctggcttcctgatagcttcattggcaattttaattctcaattctcaattttaaaagtggaaactgctctctatttactacctgtgactctaggtgatacacctgtcgaaaaggttttgccttcttataataaggagattatctccggtatccggcattttatcgttgaagatattcgttctgcccgccgtttcttgaagaaagtggaccgggagattgatattgatgcgctgacgttctacccgttgaacaagcacacttcacctgaagacatttccggttatctgaaacctttggttggcggtgcttctatgggagtgatttccgaagccggttgtccggctgttgccgatccgggggcggatgtggttgctatcgcgcagcgcaagaagttaaaggttgttcctttggtgggaccttcttcgatcattctttccgtaatggcttccggctttaacggacagagcttcgcttttcatggttatctgccgattgaaccggacgagcgtaccaagaaattaaaaactttggaacagcgggcgtattccgaaagccagacgcagctatttattgagacgccttaccgcaatcataagatgatagaagatattttgcagaattgccgcccgcagaccaaactttgtattgctgccaatattacttgtgaaggagagtatatacaaacgcgtacggtgaaggattggaaaggacacgtgcccgaactgtctaagattccctgtatttttctcttatacaaataactccttttaaatgttcgtattcatcttcgaaacaactgctgaagaatcttttgcctaagttttcttcaatctgcttgaaactccataacttgctgttcttgaagcggggagtacaaaggattgcatcgtcttttatttcagcgataaacagatagatcagccggttggtcacttcattttcaaagtgataaacaatattgaactccggctttatattttctttggcatgtggaaaagcattggttaataaacgattaacaccgtcggacaaggattcgccgaaacgcaggtaacattccagaggaatatctgtcttattcttatccaaaatagctgtcgaaggccggtcgcagagaaataacatcccatgtgtggagatagcaattcttatgaccggattgatatatgcattcttgtaattgatcgcctctactgcaggagtctttccaatgacgtctcctttggtgttgacgataggtacgtactcagtgtgagacatcaagtgattgaagaagcgaatggcaatctggttaaatagaatgctcatgacaaagacgatgggtggtagcactttataaagagtaagtttgctggtagaacttaacgggttctggcagattatcacgatactgatgataataaagtgaagtataccgaaaatcagagcaattcgtgcagaaacaacagcagcctccgccccttgtgcatacaggcgtttgttgcaggaacctatctgtttcaagaaatggttgatgaatcttttcttgtgcatatagagtattagcatcggtatgagaatgctcacttccaatgtgagaggaagtgcaccttcaggaacataatcgcccggaataagggctgccagagaaagaagaatcagtattcctgccgatatataaagaataaagttgggtagcagtatgcctttacgatgataagaaagatatacacctacgatacctatgactgtaccgatgtaaatagccgtgtcttgcgttataaattcgcacaataaaatggaaataataacggggataaaacccagtgacatgttaaatgcggaagaaagtattcctttatgatccatctctttatgtttatttgtcggttctatctataaaacaaatagtgcttgtgttttgtttgctaacggatatgtttctcagcatggtaggaggaacggacaagaggagcactctccacgatattgaatcctttttttaagccgataatcttgtattttgcaaattgttgcggggtcacatattcggcaacgggataatgccggtgactgggttgcagatattgtcctatggtgagtatctggcaaccggctgccagtagatcatccataagtgtttccacttcttcgggagtttctcctaaaccaaccataatgccgcttttggactttactccgtttttggaaatgtgagagatcacttgtaaactggtatcataatttgctgcactgcgtaccaggggactgatacgccggacagtttccatattatgagaaataatatcgggatgcgcttcaatgacctgatttagcagttctgtctttccttgaaaatcaggtatcagtacttcgatagtcgtttgaggattcaaacgcttaatctcccggatagtacgtgcccaatgctctgctcccaggtcggggagatcgtcacggtccaccgaggtgattactgcatgatccagtttcatcaatgcgatagactccgccacatgaacaggttcatttacatccaatgggtgcggacgtccggtttgggtgttgcaaaacttgcaactacgggtacagatatctccgccaatcataaatgtggcagttccctttccccagcattcccccatattagggcaacgcccactgctgcatatcgtatgcaggcagtgggagtcgacaatccgtttggtttcggtgtatcgttcgttggcaccgatattgattttcagccattcaggcttacgtactctgtcagccattataaattattcaagaagaagttggtcaaccgtgtgtacagatgattgcgggtgttgccaccgtatatgccgtgattacggttagtatatacctgcatatcaaattgcttgccgagttgtactaaatgttcggcatattccgtgcaattctggaagtgtacattatcatccgccatgccgtgtaccagcaacagattaccgtgcaacttgtcagcacgggtgaaagcagacgattccttgtatccttccgcattttctttcggtgtacgcatgaagcgttccgtataaatcgtgtcgtagaaacgccagtcggttggtgcggcaacagctacgcctgccttgaatacgggggtaccctcactcatgctcatcaaagtcatgtatccgccgtagctccatccccaaataccgatgcgatctttatctacatacgcttgtttgcctaggtaaagtgcggtttccacctggtctctggcttcctttacaccgattttcaggtaagtacatttctcgaaagcttctccacgtcctccggttccacgtccgtccacacagacaacgaggtagccgaggcttgccatatacgtttcccaactgattccccatgtatccagcacctgttgtgagccggggccgctgtattggaacatcagtaccggatattttttcgaagcggaaaaattgacaggtttcatcatccaaccgttcaatgtcactccatctgtagtctgaaaagtgaaaaattctttcttgggaactgcgtatcctgccagtttttgtttcaactggtcatttgtaaccagcgtctttaatgttttgccggtattatcgttcagcgtaatctgcattggagtatccaaactggaatatttattcatataatatttcatcgatttgctgaaaagcggtgtgtttgttcctgtctgttgagacaatttggtctttttccctttcttatccgtcttgtagaccgccttgcgcagaggactttcctcattactggtgtaatagaacgaaccatcctcctcatcataacccaaaaagtcttttacctcaaacttgccgttagtcactttcttaatgagattacctcccatgctataccaatagagatgactgtaaccgtcacgttcgctaagcatactgaaataatcgggatagaagtgaatattgtcgaatatattttcctttatataataaggtgattcgtcacgcaatactaatttgcaaagggtggaacgaggatcggcaaagtaaaggtcgaaacggtcctgatggcggttcagtgtcatgattgccaatttggaggcatcttttgtgaaacggatgcggggaatatacccatctgtatccaacgggagcttcattgtacgtgtcacgtgtgatttgatatcgtaggtacgtacttcaactttggaattcggatatcctgctttcgggtatttataggtatattcgcccggataatctttcaaggcattgatgtagggcgcttgtcctgcaaatatcgggaaagagtaggagggaacttcagactcatcgaaacggataaaagcaatcatggtattgtccgcactgaattccaatgcgcggttaaacccgaactcttcttcatatacccagtcaggaataccgttgatgatagaattttgcttaccgtcttcagtcactttgctttcgctgttgccgtagagcagttttacgaggaatatgttgttgtcacgtacgaaagcgatcattgttccgtccggagaaaagacggggacctgttgaggtccgccgtcggacagccgttcaataatgttgtttgtcgtaacgcccttatcatttcgtttcaaagggtagatataatgtacagctgtataagaatgccggtaaatcggagtcgttttcgtagcaataagcaatttctgaccgtcgggtgagaactggtaactgtcgaagtgtttgaaatcacattcgcgtgcagtattcacatcgaacaccacttccactttttcacctgtcttgaaggaatatttaataatttgtgtgccttcgccgttcatctgtgtgtagtattcaccgtcgggcgtggggattactccctgaatgttttccgggcggaaacgtccggaggtgatatcttttaaatcaagagccttttgtccttgtgccattccggtaaggcagagaaggcagaagagtagagctaaacttacttttctcattttatgaattgttttatgttttactgtttataggttttaaattcgtatcctgcaaaaatagtaataaacttaaatacctcaaagagcaaactctttttttaggttcggatagccgcttatttccttaacttttatatttgtttaggaacaagacagggctgtttagttaaaaatatgccttctcatggaaaaaaagtctctttttgtttgctttttaatttctaaatttgatatatttgtgatatcaaaataatatcaaaattaaatgctatgattacaaaagaaattaagtacgatgatgcggttgttaatggctttttggccttgtttcttaatttgatcgtgttgcctttgttggttgttgtgagttttatgcttttcaaaggaagcataattatgtttttcttgctattgctttttcttgcattagctgttctaatgattccgggttatttttcgcaggaaccgaacgaagcccgtgtcatggtattcttcgggaaatataaaggtacgtttactgaaacgggatttttctgggttaatccttttatgaataagaagaaactatctttacgtgcccgtaacttggatgtggagcctattaaagtaaatgacaagattggtaatcctattttgatcggtctggtgcttgtctggaaattgaaagacacttataaagctatgttcgaaattgatgcgcagacaatggcggataatagagggagcggacagatgactgtgactgttgccgggcgaatgaatgcctttgaggattttgttcgtgtgcaaagtgatgctgcgcttcgtcaggtagcgggactgtatgcttatgacgacaacgaagcgaatttggatgaattgacgttacgtagtggcggtgatgaaattaacgagcagttggaacaaaagttgaatgaacgtctggccatggcaggtatggagatagtggaagcccgtattaattatttggcttatgctccggagattgcagctgttatgttacgccgtcagcaggcgtcggctatcatcagtgctcgcgaaaagatagttgaaggtgccgtttcaatggtacgtatggcattgcataaactttctgaagaggaaattgttgaactggatgaggaaaagaaagctgccatggtgagtaatttgctagtggtgctttgtgcggacgaagctgcgcaaccggttgtgaatacaggtacgctgaatcattgataaactataaataagaaggtaaaatagaagtggctaaaaaggaatcttcaataaagagttttgttttgcgagtggatactgaaacaatggacgccattgaaaaatgggcggctgatgagtttcgtagtacaaacgggcaacttcagtggattattgccgaagccttgagaaaaagtggccgattaaaaaagaagtcttctaaaaccggaaataaaccggaagaatctgaaggagagcaagtggaggattagaatttcattggtttagtgaaatatctcatgatccgttcattccttcatctttccctgttcatcagtgttagtggatgaaggagctctgcctttcgtcttgtgtctgcttgtccatttacttttgtagtgacagataaaggcaagtaaaatatgtaatgatattgattttttgtatggatttgatagaggatatttaatgagattcaatatctttgtgaaaagtactttaaatattaccactatgaattcaaagagaaaagacttgcagtatgcttccgtcttcttgttggccgtggcattgacattcctaatgggaaagggtgataacttgtggttggtgtcatggggtgacttgataccgagcttgtttgtgttgttcatagcaggtgattgcttgcatagctccttgctccgtatcaaaagcggtgaagaaaatgggggagctcgttggagtacctgtttcacttttctggtattcagtatcgtctttatgggcgatttattctttatagggaattttattgttgataaactgtgggggtaaaagaatgaagaatttatctttgatagagccttttacaggcttgtcatcttttaaactatatcttttagtttatattaactagaaaaattagtttataaactaaaacttctcgttatttgcatcaaacaaagatgcaggtatgaaaggattaacagcaaaggaagaagaaatcatgggatttttttgggaaaagggtcccttgtttgtgaaagaaatgttggctttctatgaagaaccgaagccgcattttaacaccttatcaacgattgtgcgcgggctggaagataaaggctttctggctcattatacttttgggaatacttatcaatactatccgatcgtcagtgaagaagattttcgtaaaggaacacttcggaatgtaatcagtaagtattttaataattcctacctgaatgcagtttcgtctttagtcaaagaagaagatatttctttggatgaacttagacaattgattcaagaggtagagaaggcggacaggaaaggctgacctgagaacactatttaatgaacaccaattaataaaacgacaatctatactatgggagcattctttatctatatattaaaatcatcagtttgccttgtcttgttttacctgttttttcgggtcttacttagcaaagaaacttttcatcgctttaatcgtgttgctttattgggcgtactgtttttgtcattgctcattcccttcattgaagtaaccacgaaccatcaggttgaagtacaacaaacaatgctcaccattgagcaggtgttgctaatggcagaaatggaacccgcgactgtcgatgcaaccggcggagtggctgtacacgaagtcgcttccttgtcctggatagaaattcttctgcttgtttatctgtccggtattatcttctttgcttgccgcaatctatactctttgatccgtcttttcaggttaatacattccggtaaacgggaaaagttggagaatggaacaacacttgttgtccacgaacaggagatagctccgttcagctggatgaagtatatcgttatcagccggaaggatttggaggagaacgggcgggaaattctgattcatgaagcagcacatatccgtcatcggcattctattgatttattggtagctgatatctgtatctttttccaatggttcaaccccggtgcatggctgttgaaacaggagttgcagaatatccatgagtatgaagccgatgagactgttatcaatgaaggtgtaaacgcgaaagaatatcaactattattaataaaaaaagccgttggcacaaggctctactctatggccaacagctttaatcacagtaaacttaaaaaacgtatcactatgatgttaaaagaaaaatcaaatccgtgggcacggttgaagtacttgtatgtgcttccattggcagctattgcagtaactgcttttgcccgtcccgaagtctccgaaaaagtagaagaaatttctgccgtcaaagttaatgatttggccgagattgtgcaagaaaatgtgttgagagatacagaaaatatgctgcaagatactgtaaaagtgtcacatagcgatagtaaggccaaggttcgtgctgaaaatcgtgcggcaaaaacgaaaggtaatgaagaattagttgtttttgaggtggtggagcaaatgcctgaatatccgggtggtatgaatgcgttgtataagtatttggagaataaaacaaaaagttctgatgtgaaagggaaagccggaggtagtgtgatagtcggtttcactgtatctgaaagcgggaaagtaaaggatgtgcgagcgcttcagtccgaccaacctatcttaactaaagaggctgaaagaattgtgagtgaaatgccggcctggactcccggaaagcaacgtggtatgcctgtgtctgtgaaatattccgttccggtgaggtttggagatatcagatttccggagaataagaagccgttaattatagtcgatggcaaggaaatgagtatggagactttcgaaaaaatagatagagggataatagaaagtttctcggtactgaaagatagtgcatctattggtttatatggcaagcgtggtgcaaatggggtgatacttgttaccactcgcagggaggggaaaacacgtgtacaagacatcagcacttttactgagattaaagcgactgaaacaaatactgtgccggactttcttgtcgcaggaattgttactgacgagcagggccagcctaaagccggagtaagcatagtcgttcccaatacaactattggcgcaataacagatgcaaatggccgctttcgtctgaaaacaccgaaggatagttatttgtggttctcatttattggatataaaacggtgaaagcagccgtagcttctgaaatgtcaatacgaatggaacaggatgtggttaaattgtttcctgagacatccgttagtctgaaaacgaccggaactttatcttccggtactaaagtcggaaatagtttgactctttatggagttgaagagggcaaacaacccttaatcattattaatgataaagaagtatcggataaagaagctttgtctaagatagctcctgaccgtattaaaagtttttctatattgaaagataaaactgctacatctatttatggggaaaaaggaaaaaatggagtgataattgttactttgcttacggaaggagagtatcaatttaaaaaagataatccggaaaaaccttatgctgatgctttggaactggcagaaagtgtcgcagaaggggtagaaggaaagattatctattgtatagacgatgatgaagtcgaaaaatcgaaattgaaaggaatgtctataaagacaattaaagcagtgtctttagatcaagcgggcaaagagaaaattgtacgtttgaaaacagacaagtaccgttctgactggattaccgtgaccggagtagtgtataatgaggacgagaaaccgacatccgctattgtaaatgtaagaggtacgagatttacggaaagaacagattcaatagggcactttactataaaagcccctaaaaacggtgtacttctggttggttataatggaaagcctaccattgaagttaaagtgaagcctacacttaaagtcattttgaaagataaacaagaatgattttataagctagcgacgaactcatacgcaaggttgttgtgctgattaaattaaagaataaatatatgttgaactttaaattctatttattatgaaaggaaatttatgtaagattttgttggctgtttcatttctttttcttatgcccaatctttgtatgagccaaaacttaaaaggtatctggagacttgttcagaatgacgctacttcacaagtgaccagatataaggtacttgataaagaaggtaaattttataatgtagatgcctatgttaaaaatgcaatgtacttagaagcaggaaacagaggtacgggaagcgtattttgtccttataagattactcgttcgggtgagtataatattattgcagaaggactttattgtgaggtattgcataatgaatatggaagaaccgcatcagctcttgttcctatatcctaccggattgacggaaaacgaatgacgcttttattccaattaggcaacagtgtttaccgtgaagtttatcagaaagtatcgaaactgggtaaataaaagtttttactcaatatgatctttttttaacggaggtacgaaagtatctccgtttcttgttccggatgaaaccaacgtatttcctcatcccgcttaaaccaagtcatttgtttgcgtgagtaaatgcgcgaattttgttttatcttttcgatagcgaaaggaagttcccattctccgtccagatatttgaacagttctttgtagcctactgtattgagtgaattgagatgtcggtaaggaagtacggaacgtacttcttccagtaatccttcttgcatcatttggtctacccgacggttgatacggtcataaagttcttctcggtcgcgggttaaaccgactttgatgatatggaaaggacgttttttcttttgttgtgtgcggaaagaggtgtaagtacgtccggtcatgtagcagatttccagtgcatgaatcacccgttttggatttttcaaatccacaatacgataatactccggatctagtaaccggagttccgcacagagttgttcaagcccttcttcctcgtatttctgcaacatgagctgacgggtttccgcgtctacggtaggaatatcgtcaatacctttgcaaatagcatccacatacatcattgaaccgcccgtcaagacaaccacctcatgctgcatgaataacttttcgagaatctccattgcttccgtctcatattgcgcggcgctataatagtctgtaagatgaagcgttcctaccaagtgatgcggcacacgttcgagttgttcgggagtaggagcggctgtccctattttcagttcagcatataactgtctagaatcggcagacacgatatgagtctgaaaattctcggctaatcgcaggcttaattctgtttttcctacgcctgtgggtcctatcagaacgatgagagtgggcatggggttaaaagtagtaagtatcggttgttgagtactaaaacatggaattaaaaaatgtcaggtattaactgcccggcactgcatagcaattaatacctgatacttgatatttaagacttagaatttatcttcttcgtatgggttgccagcgtcgcctcctcctatgtcaaaaccttcctgatcgaagtcctccatgtcgaagtcctgatctccgtaaaagttttcgtcgaggtcgagcgagccaccggctgcggccatttcttcaaaatcaacagtctgtttgggagcttctccggctttcttagtacatttagcaccattcatatctttaccggtgataatttctgtcagttcgatgaagaaacaacgttctgtcatgtagtcgaacacatacagtaacttttgtttttcgtcctctatcagttcgctgatcggagtttctttcatcacccagctatctatttccggattatcatccatttcttccaaagtcacttctttttctttttcccaatcatcgtcgcagataaagaaagaagtcatctggtcattagcataccctactgatttcagtatagcttcatggaagtcgaagaatgttgcttccggatcaatttgtatttctctgacaaaatcgtcaacttcatcagatatgatagtaaatctgtatatcataatatgactattttgaagtgtttatttaataattccacgctccgagttgcggatgaattcaatgatatagtcaatctcgggactcttttcaaattcatcttcgattttcttcaatgcttcagtcgtgttcagtccactctggtagatgatacgatatgcattgtgaatattctcaatcacttcgttggcgaaaccgcgacggcgcaagccgatgatgttgatgccgctgaaagcgatcggttcgcgtcctgcaataatataaggaggaatatccttgctgaagcggcatccgccctgaatcattacatgactgcctacatgacagaactggtgcatcaatacattggcactaacaatagcgttatcatcaatcacgatttcacctgccattttggtagagttcccaatgatacatccgttaccaaccagcgcatcgtgtgccacgtgtacaccttccattagtaagttattgttgcccacgattgtgcgccctttagctgctgtaccacggttgatcgtgacattttcgcgaatcagattattgtctccgatttcggctgttgactcttcaccgcgaaacttgaggtcttgcggaatggctccgataacagctcccggaaaaatagtatttccgttaccgatacgtgaaccatataaaatattggcattagccataatcttattgttgtcgccaataaccacgtttttatctataaatacaaaaggcgcaatttctacattttccccgatttttgcttcgggatgaatatacgctaaaggacttatcatgcttttaaatatcaattattacttgttttttactatttgtgccatgaattccgcttcacaaaccaccttctcgccgacgaatgcataacctttcatcgtggagataccacgacggatcggagccagcaattccacacggaacaataacgtgtctcccggcactaccttttggcggaattttacaccgtctatcttcataaaataggtagagtagcgttccggttcgtcaacggaattgaggacaagcagacctcccacttgtgccatggcttctacttgaagcactcccggcataacaggttcttgcgggaaatgtccctggaagaaaggctcgttggcggtaatattcttgacacctacgatatagttggcaccaatttcaattactttatctaccagttggaaaggataacggtgcggcagaagttcacggatgcggtttacatccattataggttcgcggctacaatcataagtcggtgcctgaatttcgtgcaagcggatttctttccgcatctgacgggcaaacttattgttgattgtgtgtccgggacgggtggcgatgatacggcctttgatcggtttaccgattaaagcaagatcaccgattacgtccagcaacttgtgacgggcacattcattcggccaaaccaacggtttatgattgatataacccagctggtcggcatccatgtgaggaactcccattacgtccgccagcttgtcatagctttcttgcgacattttacgttcgtagataacgattgcattgtccaagtcaccgccttttatcaatccggcagagagaagaggctctatttcgcgaacaaagacgaaagtacggctggcagccacttcgtctttgaatttatgcatatcttcaagtgtcgcaaactggttagggatgattgtcgagtcataagaaaccagtacattcaggctaaaattctcatccggcaatacgatgatagaagaaccggttgcttcatcacggaattcgattttagatttgatgatataaaagtctttgacagcgctttgttcttctgtccctacacgttctatttcttgtacataatattgtgcactaccgtccagaatcggaaattccggaccattcacctggatgaggcagttatcaatgcccaatgcgtaaagggctgccataccatgctctacggtacttactttgactccgttctttgataacacggtaccacgggtggtttccgtcacgttgtccgctactgcatcgatagttggttgtccttccaggtcaatgcgttggattttatatccgtgattgtccggagcaggattaaatgtaacagtgaggtcaagtccagtgtgaagacctttcccgctcagtgaaaagctatctttcagcgttttttgtttcagcattggttacttatttaatagttgttttaattcttctacttctttgcgtaatttgttcagttctgtgtacatatccggtagtttcttagtcacaatagccgccttgaaatacggtttcaactccataggaggtgttccgatcagttggttgtcggacttaatgctgcttggtacacccgattgcgctccgagatttacgcggtcaccgatcttgatgtgtccggcaatacctacctgtccgccaaacatacaccattcgccgatcttggtagaaccggcaataccgacttgagcagccattacagtatgcgatcccacttcgtcgttgtgggcaatctgtaccagattatctattttggcgccgctatgtataaccgttgctcccatggtagcccggtcaacacaggtattggcacctatgtctactttatcttccagaataacgattccgatttgtggaatcttatcatacccgttaggagtgggagcgaatccgaatccgtcggctccgattaccgcgccggaatgtaatatacactcattgccgatacggcagtcatgataaacgtttacatttgagtaaagcaggcaacctttgcctatctttacaccgtctccaacaaaagtatgcgggtaaatttgagtattatctccgatgacggcgttctcgccgatataagcgaaagcaccgatatatacgttttcgccgatcttggcactgggtgcgacaaaagccaatgaatctatcccttctttcttgggtttgctcatttcataaaggttgagcaattttgccaggctttcgtaagcattgtctactttgataagggtggctttgatctcatgctcgggagtgaagtccttattaaccagtacaatgctggactgtgtctcgtagatataaggtgtatatttagggttcgacaggaaagaaatagctccgggcattccctcttcaatcttagcgaatgtgtgtaccgtagcgttttcgtctccaatgatttccccttggataaatgctgcaatttgcttagccgagaactccatgtcttttctttaaaatttaattagttcacaaataacggacttttttttcagatttccgtgttattgcatgaatattttatacttatctgtgcaatctctggtagcagagatagtatttctttacctttttggacaataatgagatgttcagcatgtccgatgcttcggcaatatttttgatagtgccttccttgtagataatgtcaatactgtcatctgccgggtcgtacatattcttttcgatgctgggggtagagacaaaatagttcgcttcggaaagggttatgcctagttgctggctgatgtgcaaagttaattctttttttctgtcctcactaatcggttccgacgaaatttccactttaaagatatttcggttgatcattcccaggcttaaggtggaaagaactttgtcaggatgagtgctccatacttttaaagcagtccagatatcattatcatccagttggatgaaattttccagacaatcgggattatgatagaactcctggtgattgatatcattgtagaggaagaaacgcaatgcgggcgatgcaaataattctacaccttttgaggcaagttccttagcacgtagcagggtgctgatgagcattctttcataagcaaccgaggtcttgtgcagatatacttgccagtacatcaggcggcgtgcagtcaggaaattctcaatagaatagatgcctttcgattcgataacgaggcggtcgtccgccacgtcgagcattttgatgattcttgccgaaccgatattcccttccgttacaccggtgtagaaactgtcgcgtcgaagataatcgagcctgtccatatccagttgcccgcttacaagctgatgcaggaaacgtttcggatattcgtccttgaagatttgaatggcaaggctgagttgcccgttcatctccttgttcatccgttccatgagtataagggagatttcttcgtgagaaactcctttgacaatggtgttttcgagcacatgagagaaaggaccgtgaccgatgtcgtgcagcaggatagccgcttgtacagcttcagcctcgctgtcaaagataaaattacctttggaggccagttgggtgatagcttcgctcatcaggtagaaagcacctaatgagtgttggaagcgggtatgttgtgcgccgggatatactaccgaggagagccctacttgcttgatgcgggtaagacgctgcaaaaggggatgccgtacaatatcatacagcagcccctttggaatattgataaacccgaatacagggtcgttgattatctttctttcgtaaggcattcgtttcttttagagattctttattcttttagagaatggcttttagctgctctgccatttgtgcctgtacttcttgtgcggcagtgcgggcagcttcggcaaatttctctgtcttgtccacatagataattccacgggacgagttaacaattaacccacaggtactgttcattccatacttgcaaacttcttcgagcgagccgccttgtgctccgacacccggaacgagaaggaagtgattaggaacaattttacggatgtcttcaaacgcacgtccctgagtagcgcctaccacatacatcatgcggtcatcgcctgcccattcctgtgatttgcgcaacactttctcaaacaagcgttcaccgttcacgtcttccgtcaactggaagtcatgagaacctttgttggaagtcagtgccaacaggatcacccatttgccttcgtaggtcaggaacggagttacgctgtcctcgcccatataaggagctacggttacagagtctatgtccagttcttcgaagaaagtacgggcatacatggcggaagtgtttcctatatcgccacgctttgcatcggcaatgatgaactggtcgggataattatctttgatatattttactgtcttttcaaaggcaatccaacctttcacgcccatgctttcatagaaagcgaggtttggcttgtaagcaatgcacaagtcggctgttgcgtcgatgatagctttgttgaaagcgaagatcggatcttcttccttcagcagatgttcgggtattttcttgatgtcggtatcaagtcctacgcaaaggaatgatttcttgcgttttatgttttcaaataattgttgcttatccatttctatataaatgttttaaagttcgctttctttcagacgttccgcattttccgccacaatcaggtggtcgatgcaatcttggatatctccgtccatgaaggcggtcagattatagatcgtataattgatacggtggtcggtaatacgtccttgtggatagttgtatgtacggattttagcagaacggtctccggtagataccattgttttacgtttggaagcaatgtcatcgatatatttctgatgttccttgtcgtagataaaggtacggaggcgggccagtgcgcgttccttatttttcggttggtcgcgcgtttcggtacattcaataaggatttcttccgctacgcctgtattcggattcttccagatataacgcaggcgtacaccggattccaccttgttgacattctgtccgccggcgccaccgcttcggaaagtatcccatttgatttctccttcgttgatgacaacgtcaaattcttccgcttcggggagtacggctaccgaggcagcggatgtatgtacacgtccctgcgtctctgtggcgggaacacgctgtacgcggtgcactcccgattcgtatttcaatgtcccgtaaacgttatcacccgtcacgctgcaaatgatttccttgaaaccgccggctgccccttcgttggcgctggatacttccattttccagcctttggtttcgcaatacttggcatacatacggaaaaggtcgccggcaaagatagcggcttcgtcgcctcctgtaccgccacggatttcgagaatcgcattcttgctatcttgcgggtcggcgggaacaagcatcagtttgatttcctcttccaatacgggaagacgttcctgactactgtccatttcttcttttgccatttcgcgcatatcggcatccgattcattggctagaatgtttctggcctcttcaatattacccagcagctgcatatattccttgcgggctttcatcaaatcatccagttccttatattctttcgtcagtttgacgtaacgtttttggtcggcaatcactgccgggtcggtgataagggtagatatttcttcaaaacgggctacaagtccgtctagtttctctaatatggtactgttatctgccattctttagtatctgaattctccgaattcgctcttaatgattaattctgtctgttcacacgcttcgatacgtcctacaatctgtgcggggataccgaaagattcggaaatagcaatcacctcttcggcatgttccggtgacaggtaaacttcgagacggtgccccatattgaatactttgtacatttctgcccagtccgtgccgctctgttcctgtatagtcttgaacaacggaggaacggggaacagattatccttcacaacacgtacattttctacgaaatgcagcactttggtttgcgcaccgccggagcagtgaaccatgccatgaatttcggagcggagtgcatccaacagtttctttaccaccggagcatacgtacgggtaggagagagcactagcttgcccgcatcaatcggagaaccttccacgctgtcagtcagtttcagtccgccggaataaaccagttcttcgggtactgccgcatcgtaactttccggatatttctctgcgagatatttgccgaatacgtcatggcgggcacttgtaagaccgttgctacccataccgccattgtattctttttcataagtagcctgtccgtaagaggccaatcctacaataacgtcacccgggcgaatgttggcattattgataacgtccgagcgtttcatgcggcaagtcacggtagagtcaacgataattgtgcgtaccagatcaccgacatcagcagtttcgccaccggtagcatatacgcctacacccatttcgcgaagttcggccagcagttcgtccgttccgttgatgattgcagagatcacttctcccggaatcaggagtttgttacgtccgatagtggaagaaacgaggatgttgtctacggcacctacacagagcaagtcgtcgatattcataatcagggcgtcttgtgcaatacctttccagacagacaggtcgcctgtttctttccagtacatataagcaagggatgattttgttcctgcaccgtcggcatgcatgatgttacaatagtcagggtcacctcccaatatgtccgggatgattttgcagaaagctttcgggaaaattcctttgtcgatgttcttgatggcgttgtgcacatcttcttttgatgcgcttacgccacgcatcatgtatcgttgattactcatgagttatagaattattttgtatacggctgcaaaagtactgcttttttttcgtacagccaactatcttattagaaatgccgttgcttatctctagaactctactttcggagctttttcacttccttcttctgcttcaaaatatgctttcttatcgaaaccgaacatacctgcaaagatatttttcgggaagcggcggatattggtgttgtaagcttgtgcagcatcgttgaagtttttgcgtgctacgttgatacggttttccgttccttccagttgggcttgcagctcaaggaagttctggttggccttcaggtcgggatagttttccgtgatagccagcaacttacctagtgctgaagttacggcaccctgtgctttctgatattctgccagcttctccggagtcaggtcttcggcatccactttgatttgggtcgcttggctgcgtgctgcgacaactccttccaaagtctctttttcgtgcgttgcatatccttttacggtatttaccagattcggaatcaagtctgcacgacgttggtattgagtttctacatttgcccattgaccggtaacattctcgtccatagtaaccagaccgttatatacacttactgcccatataacaaggatagccacaacggctaagatgatgataattgactttttcatgtttcttgtttttttattgaaattgataatctgattgtttctagttttagaaccgggagccggcaccgccgcctccgcccattcctcctccgaagctgccgccgctaaaacctccgcctcctccgaaacctcgacctcctccgaagccaccgataaacggaccgcctccgccgccaccccgatggtgataatcattgtcataactttggtggcgacgcacgagtgtatgtccgcagttcctgcacgtataagtaatatcttcggtcttcactccgttgattcgggaaacaagcctgcttccgcttctttgtaattggtgtttcccgcaattcgggcaacggctttgtttccgtgctgcaaaaaaggcgagtcccccgccgatagcgaagaagcagaaaagagcgaggaagaaatcaaatgaacctccgtctccgggttccgccagagaatcattctccatagaaccgtcgagccgttgacaagttgctttcaaacctgccaccattcctgcgtcccagttcccatctttcagataaggaatcatatatttcgtttgaatccttttgcagattgcatccggaagcacaccttccaagccgtagccggtataaaattgaatacaacgttggtcggtaactaataaaataaccagaccattgtttttgtctttcttccctacaccccatttattcagcagttggtggcaaaagtcgaaacagtctgtctccccgatagagggaactacggcaaccaccgtttcaatgcccgtctgctgttccaatgcatatagcatggcatctatgctgtcacaagccgcttgcgacagtattcccgccggattacaaacatattgcatcttgttttgcaggtggactttgggaagattatctaccgtgtatactttctcctgagcttgcagaggaaacagtaaaaaggcggcaattataaatgtgaatattgatttcataacagttgttttacatttgcaaagatagaaactttttctgttatggttttaaaactctttgttataataggtttaatgaatgtatcgcccgacgaagtcacggactttatcggtgtactcctgtttattctcctggtatgaaacggcatgagcagcccccgatacaatccaaagttctttaggctctggttttgcttcataaagcgggtacaccatccaggtgggcacatacgtgtctttgtctccatggataaacaacatcggtaacttgcatttcgccacctgcttcaatgaggaagcctctttgaagttccacccgtattttttctcacatagccagcttgtggtatacatcagtgggaaaggaggaagaaagaaggaagatttcagttcatgcgagaactcatcccatacgctggtatagccgcaatcttccacaaagcatttgacaaaaggctgctgttcctcaccggacaccatcatggtggtcgcacctcccattgaaataccgtgcaccgccatttgagtgctgtctccaaaaatcttgttggcaatgttcatccattggagtacgtcaaaacggtctttccaccccatttgaatggcacgcccttcgctctcgccctgatgttgaaggtcggggagcagaatgttatagcccaaatcacggttgtacaaatacccgatcataaacatacgaatggcgttatccgtatatccgtgaacgatcactgccgtcttgtcggtcggtttaggggcggcaacataatatgcatgaagctggataccgtgcggattgataataaaagtatctttgagtgcgtccgcttggcgcaaactatccacccatgggcggaggaatggatagtttctgtacatatagggataagagtcagcatctttagacaatatcttggcatccggggtcagagagaaattcaacatatagaaactcccgccgattgtgcaaccggtcaacagcagcacgacaatgataatgacataaataactctctttctcataacttatcccaatttataaataatctctttgtctgtcaggaaatcacgtcctgttatttaccttccgcatgagaactcgggagagacattccgctggctaccggttccagatttcccaagcggcaaatgcttgaagcagcagcatttccaggccgtttttgacaacagcgccttgtgcttctccttttttcatgaagagggtgacgttcggattatataacaaatcgtagagcaaatggtttggagtcaatagctcgtaggggatattcgggcagaaatctactttgggaaacatacctacgggagtacagttgacaataactgtatattcggccataatttcaggagtcagctcctcgtaagtaagcattccgtccgctttgtgagtacgcgaaacgaaaacactttcgattcccaggtttttgagtccgtggtagacagctttggaagcaccgccggttcccagaattaacgctttcttgtgatgagcctgtaataacggttgaatggactggataaatcctatgatgtcggagttatagccgatcagtttaacttttcctttctgttggcggataatcttgattacattgacagcacctatttttgcggtgtccggatcaagctcgttcaagaaggggatcacctgctctttgtaagggatagtgacattgagacctcgcaaattggggttctcctcgataacttccataaaatcattgatttgaggaatctcgaagttcacatattctgcgttgatgccttcggatttgaacttctcgttaaagtatccgatggagaatgaatgtcttagagggtagccgattaaaccatatttttccataacacgaaagaattaaattaaccattcataataactcattattttgtcgcggtgtaaagcgtgcagataccaaatgtcagccgccggaagtttacttcgctgaatccggctcgtgagatgacacctttcattatttctccttgcggaaagactttgattgtgtccggcagataacggtatgcgttgttgtctttggagagaagtttgcctaataacggaatgacggctttggaataaatggaaaataattgcttcatcgggaaacggtccggagtagtcagttccaggataacgagatgtccgcccggtttcagtacgcggcacatttcggagagccctttgtcgagatcttcgaagttgcggataccgaaggcaacggtaatagcgtcaaagtcattatcggcaaaagagagtgaagtacagtcctcccgggcaaaagaaattttgtccgagagtccttccttctttactttttcacgacccacgttcatcatgccttccgagatgtccgtgccgatcagttcggcaggttgcagtttgcggcaggcaaggatagcgaaatcccccgtaccggtagccacatccatcatacgttgcggatggaaaggacggagccaggcaatggctttgcgacgccagctgcggtcgatacctaaagacaaggtatgattcagtttgtcgtaagcatgtgcgatattatcgaacatacgttccacctgctcggtctttttgccttcctcgttgtaaggcttgatatgttgttgtgggtagtccattcttattttgtcaagaaatccattacgttcttttcgatacgttcagcgatgttgctggtatcttctttcacaaatttctcgccggtgatgttttcgaacaattcgatgtaacggtcgctgatgctttgtacgatagccggagtcatttccggtactttctgaccgtctttaccctggaagccattttccattaaccattcgcggacgaattctttggaaagttgtttctgggcctcacctttttcgaaacgctcctgataaccttcagcgtagaaataacggctggagtccggagtatggatttcgtccataaggtaaattgtgccgttgtgcttgccgaattcgtatttagtatctacaaggatcagtccgcgttctgctgcgatttcagttccgcgtttgaagagagccagcgtatatttttcgagaatttcgtattcttcgggagtagccagtccttgtttcaggatttcttctttagagatgtcttcgtcatgaagtcccatttctgctttcgtcgtcggggtaacgatcggttccgggaatttttggttctcgcgcattccgtccggtagtttcacaccgcaaatttcgcgtacgccgcttttgtaagcacgccatgcgctaccgcacagataaccgcgtacaatcatttctaccggaaaaccttcgcacaataccccaacggtaaccatggggtccggagtagccagtttccagttcggacagatgtcagtagtggcatcgaggaatttagctgcaatctggttcagcatttgtcctttgtaaggaataccttcaggcagtactacgtcaaaagccgaaatacggtcggttgctaccatgacgagtttttcgccgttgatgttgtacacatcgcgcacttttccgtggtacacgcttttctgtcccggaaagttgaaatctgtttttgttaatgctttcattgttttatctataattacaaattacaagttccaatttataagttgcaataggcttccggattttgagtctatcagtcttttgccagtttcaccgggcgttcgccgttgatgacgagttgctcgtttttccgtttctcccgttcggctttcgcttccttgtcgaatctctcgtaagcgtctacgatgcgttccactaacttatggcgcacaatatctttcttgttcagctcaacgaaactgatgccttttacccctttcaggatacggagtgcctgtaccaatcccgatgtttgtgaggcgggaaggtcgatctgtgtcatatctcccgtcacaatcattttggtattcatccccatgcgggtaaggaacattttgatttgttgtgcagtggtattttgcgcttcatccaggatcacgactgcgtcattcagcgtgcgtccgcgcataaaggctaacggagcaatctgtataatgttcagctccatgtattcctttaacttggtggcgggtatcatatcctgcaatgcatcgtacaacggttgcagatacgggtctatcttatctttcatgtcaccgggcaggaaaccgagtttttcgccggcttctacggcggggcggctgaggatgattttcttgatttccttattcttcagtgcgcgtacggcaagggcaatggcggtatatgtctttcccgaaccggccgggccgatagcgaataccatatcattcttggcgaagccttccactagtttcagttggttctcgctccggggaatgatcggctttccggtgacgctgaacacaattacgtttccgttctgttctgcttgcggggcattccctttgatgatgtcgatgataacttcttcttttagtgaattatattcggcgcagtatttctccagtttggtgatattttcttcgaaggcacacatttcttcctcatcgcccagcactttgatgacattgccgcgtgcaacgatacgtagcttcggatataaagcttttattaactgtatgttagcgttgtttacgccataaaaaataaccggatcaatatcctcaaggacaatcagtttctctatcattcaattgtattaaagaaaaatttctgcaaatttaatgaaacgttttggattctctgattgtttggggatgaattttattgcaatttatactcatcttttctttaccgggcagtaatatggaaacaaccctgtttcagctcatacttgatgtagcatttttcggcttgtcgcaaatctctcagaacttcggacagaacaagtttcagggtatcggagccgacatcctgtaagggtcttccatcctcgtcctccaccttcttgaaccgtttccagctaacatcgaaagtagctccgaagcaatgcgccgagttggcggaagcgttcccgtttctgcgacgcagacgtttcacgtcgctttgggtacgcaatacggaagtgacaatcacctgattgggatttaatcctttggcagcaagtgaatcgagaaagttagaaccgatagtgtcgagtagcgcacttgcacgagggacgaggtaggggatggaatgggtcagcgaatctaccacatagaactcattatcagtgatatgtgtcaacttttctttcatgctttctgcttcttcccggtcctccaacggacggataccaacagtttttgctacttccagatgtttgtcattcaaatcggggaaagagcgtttgtagctgacaacgccacgaatattgcgtggttcgtttagtttgagcgacatatctttctttttgcaaccggaagtaagcgtaagccctgtaattagtaggaagatcggtaaaatacgaagtttatgtatggccattttgtattttttgcttgcaaatatacactattttgttctagtttaccaaatggattctatttgattttttcgttcctctactataaagttgaaaagtatgaaggtatggttgtttcctctctcttttagtagagattagggattatttcttcttttcctcttttttctcctcagttttttcttccgttttgttttccggatgaataattccctttacagtttcaccgataggcagtttatccaatacgccgagactaggagcaaccgttttcactaatgtattcaggaagttgcttgtactcccgtttcctccatcgaatacagtgatgtttcctaagttcatgtgttcgaatgccttcacctgttcgccggcaatttccttccactggtctaccatcttgtattggatagcgatagctggatttgattcggctgctcttaccattgcttcgaaaccttctgcttcggcgagcaatgactttttcttaccttccgcttctgcttctaattttaactggatcgctctggcttccgcttccgcctgtgccagagtcgcttttgcgcgggcctctgcttcgcgggtaatcttctctgcgatagcattcgcctgcaggatagcttcttgccgggcaatttcggcaggaacaattttttctgctttcagtgaagattccacttttttggctttcgcttcttccacttctttctgagcaatttcgcgggcagcctgtacggcagcttccgatctggcagcagcttcaccggcttgtttgtcggcgttggcttgtgtcacggctagttcggagtttgaaagagcgacttccttttgtgcttcatttcgcccgatagcagccttcttaccggcttccgcttgtttgatttccatgtcagagttcagttcggcgatgcggctttccttttcggtatttgcctgttcgatacggatatttttctccgcttcggctttggcaacctgcgcttctttctctgcgttggcaatcgctacttgggaaattctgtccttgtctgcattggcaacagatatctcctgcaatttcttggtttctgcaatggcgatatcctggtctttgcgggtttctgcaaccttcgtttcacgttccttgatttgagtcgcgattttgatagcaccgagtttttcctgttcttcgatattagcttgtgcttcgttctgggccttgctctcggcttccttacccaagttcacgatgtagttggcagcatcgcggatatcactgatgttgatattcatcagatacaaaccgaatttgcggagttccgtgtcgatattgtcttttactttagaaaggaatttatcgcggtcggagttcagttcttcgattgtcatgtcggctatgaccagacgcatctgaccgtaaacgacatctgtaatcagattctgtttgtcgtccatggtcaatcccagcatacgttcggcggcgttttgcatgacttcggcatcggtgctgatagcaacagtgattgtagtcggaacatctacacggatattttgtgcggaaagtgcgcctgtcagtttgcagtcgatctgcatcggcttcattgacagaaattcgtagccttggataatcggccagacgaatgcggcaccaccgtggtataatttagcagatttcttttctcctcccgtcttaccatatacaacgaggacttcgtcactcttacatttgcggtagcgtgaaaggataccgatgaaagtgagcaggataaccgctactaatatagcggccatgattagcatttcttgtgtcataaatttgtgtatttagagtaattattgaatatacaatgttccgtcctgatatctggtgataacggtacggtctccggtttgataagcttttcccgattcggagatgacgtctacttcgcgcattgctccgtcacggttggtttgtacggtgtatttgctgtcgctttgtttgaaatagatggtacattcacgtcccacaagctggtctgtctgttccgtgcggttgacttgttgcagttggtaggctttcttatacagaaaccagacggcaaaaacaaagaataaccctaccagaataccgacaacgtaactttggatttccgtgtttcccgccagatacatataccagccgaatccgattccgaagtgggtaagtcctttaaaggaaaccacactgctgatgtcggtatctacgtctacatctgcatccagatctccgaaaaagatagataatacgaattggatgagaaagattcccgttgtgacaagagcgatgatgagaaaaaaggtatggctcatagtaattctgtattaatataaagtctctagttataatacctcaaatatacgggtttatgggagataaacaaagataattcataaaaaaaatccccacccactcagcgctactttcacaagctgcctctgagtggactgaggaacacaaacaaaacaaacaatttctgtgtaattcttttatatctagttatgaagcttatactctttgacggcttctatgccgtaggacagtcgagtataagcagtgagtcttcacacagcgtaacggagcatttttccaggacgttgagatcgatctctatttttattctaccgcagacatcttgcactttgtgtttaaagtctacaaaacccttcacgaatttctctatccggttggctgaatgttcgtatgcataccagtgcccgttttcttcaaacagatacgcttggcgtatatctgttgattctagttgtaggatgtctttcggtgtcataatgtggcgtattaagtattattttaagttgatattaaaggtatagttgttgttgcggtaaagagaataatcatcacttgtacccggagcgttagcgcctagtttgatggtataggtgtatgggatagtcttttctacttctactttttctgtgattgtgcgatctacccacttgtagtagacggggatccctctacgagctatgtattcctttcctgaatcataatcaatgaaaccaccatattgtctgctagggtctggattagacttaactgtgcattttatagcgcctctatcgctctcatcacatttcacagtaacttgaattgttttttctatttcttctgttacagtagtaaccttatcagcttttacaataagtactgtctcttttccgctttccggtgtgatattttctcctgtaaaatagtaacaagtgattggggatgagctagtcacttctttatctttaaaagtattatcttcgggaaaatctacataaatattttcctcactacctaccttcatgggtgaataatgacttttaatgactgcattctttagttgtaatcgaagattgcttaatgtactttcactatctgctgctttaattacaatatccaaacgagccgccatacgtcccaatgtgatattaaccggatgtgaagtacttaatgtaccttgatagaaaccatacataaacatcttggaaggtaaacccaatttggcatctgttgcatttcggttgataggcaacgttaaaagttctttctgtaatagttgcagtgtctttggccatgttctgttgtcattatttgggacagaggcagttgaaggattgttaccaccaactgttccttcaagattggctattaaacaaagtgttcctttgttactatcagtaagcgttaatcttgcagtataatcagttgctaattctcctttattattcaaatgaatatattctgtatcgctttctactaatcccccttcttcattatagtgcaataaccatagattgtacatcggattttcgatttgtaaatctatcgggttggcagaacgtgtttcttctactgtgaaatccgtagtctgtaaattgagttgtacggcgatctggtcttctccaagttcaatcgccggagtttgatcgtcggatatcatccattcctcttcggatgagcaggctgctaaaaacagacaagctattaaagtatatattgcgtttcgtttcatgattttcttctcctatgtttatttatcgggatctatgtcagctgtccaggaagactcctgccagttggccactgtaatgccgtcttttatatcaagtgttacggtgtaattgtatgaatatcccggtaggaactgtttgcctacaatagaataggtaaattgtgtggggacgtcatttaccaatacattcataataactattaccggggtagaacggcaatctgtaggcaagatacccgtttctccttgcaggattccttcagatgtagtgataaaacttttggccggaacataaattcgattgtatttatctcctaatttagacagcatattgtctcctacggtatagttatttcccgtggtaggatctatttgtataccgtctatttcaacacccgcctgcatgatagataaatgagctattttatcagtccccttaattaagaacttcatgcgggaagttacttgcatcagtggatttagaagaataactccttcattaccagaaacctgacaagtagtagattcagtttgtgtccaagcattattggtcgctatcacatattctccgtttttaatcatgcatgtgccatctttataggatgccttcgctggtgaaatagcactaaatgtatatgtacccggatttaagaataatggagtcttgcttacatcctcttccttataattcccattttcatcaaattgagaacaaggataaagtgattggacaccaccatctccggtctttacaacatagccttgtgtttgcgtagttgtagcgccttttgcgaaaagccataatgtactaccttctgaaaggttcagaatcttaactccgtttaatgctgagttattggtagcacgggtgttgctttcgggtgcatcttttccggacataatggcatactgacctcctaattgtactgttaccggtactttgccttcattcggcagggatcctccctcttcatcggacgtacaggctgttagtaacccaaccggtatgagaagaagcattagctgttgtatataattccttgctttcatatctcttttatttgttttgttcttaattcacatttttatcacgtacacaacgtacggaacaaccataaccacgccgttcttgatcccacgtatatagatatctatgggattcatcaccactaaactttatgcggaaactccatgatttattatctcttgtatttgctgtagatgtatgataaatcgcttcacttccggcatatatcagagctgctccgtttccgtctacatgtatatatccgctaattggtagcatgagtgtttctaccggattatcccaatctgtataatccttgttgtaattctcttttgtcagtgtactatttttgtccgcaggataacgcgaaataacaagtactgaacgatatccttgtgcatcgcctcccgtgtcacatttatctttatcaattgatgtatttcctacacgtttaatttgccaacgtactcggtaagcattgggtgttccttggcgtttgattgcgtagatggtaccccacctttctgtggaggaaggaactcctacatatactgctttctcattatgaacatcataatttacggttgtactgtaagttccactatgatttaaaaaagttatatctcctgcatcttggctgcttggaacaattgataaaaattcatctttagtaggtagtctccaacctttcggacaaggctgatttattgggttatcccaatatgtggcacttacattatgatcggaagcccaatctctactatagtattcatttgctgaagaactgaatttaaatacctttgtttctcccggatcctgcgcgcaatcactatagccgtagcttttatcagtacgttgtgcatcgttataatgcccgggaacgtacgggaaaggtttagcattatcaggtttataactactagttttatttgcaccattacaatcagggactgcattggtaggatcttccacattaggatctaagcagctgccattcaagtaataaggaatactacgcccgaattggtagtagaatccccgcgaagcttcccagctttgaatgctttttgttgcatcagcacttgtagctcctaagtttctatccatccatgtcacactgccgaaggtaaccgagctacctatttgtgtatcctcgtaatccgagttgtcgtctatccagtcgtatacacgaggaattacggttactaccatggttgtttgagtcatggtcagtacgatatcatattcatagtttggtttaaacttgaatgctttgtattttgggtttttattatcagttgtattttctacgtctacttctttaatacgatatgtagttgtcttttcgtagtcatccactttcgttgttactttcagtcctaaagcatgagagtcagtgtctgttcctctggtagggaatgtcattgctgaaaaaatttcatttttagctgtttcttcattaatttcaatctctttcttgtatacagaatgtgtatgggctgtattatcaactcttgtatctgttgcgctactgaactctccggttgcaagacttaagtcaccggataaatagtctattagttttacttcttttagaacaacagtggaattggctaattcttcatttttttgtgcgtagatatgaagtttggataaagtatgctcaaaattcaattgtaattttcctgagtttttgtaggtttgatttttaagattacccgcccacatcacatcggttaatgccccgttttcataagagacataacaagtgggagcgctgttgtcagcattatattttatttccggtacatactctttatcactcagagttactgcataaaagtttaaactatgattattgaatttattgtttccatcgaatgatatagtgtgttcatttgtttcagtaccttctattgcgttcttgcttggggttttctgtagataattagcattccagttgtcattttcgacagcgaataactggtattttgtacctgcctcaaatgctttctgatcgtcgtcggcggatacgtctgctctcgtatagatgcttggaaggcccgagaattgaaaaactccattcccttctgcagcactattatcataagtgtcttctgtacatgctgcgaatgctgttatggatgcaatcacaagcaaaccgttgattatgttattatatctcatcatggcttaattgttgttttggatgtttttattgtttagtcgggttaatggggactgtgattaatcctcctgctttccagggtgcttttacgcctgtaagcgtaaatgaatcttgggtgaagttgataaccacttcataagcttctcctgcctgtactattgataccggagtctgattattagcttccagtagttgtacatttatctctccatagttggttttaatgttatctgttgaacctacgggggtcattgttgcttctagattgaaagagagttgtccgttattgttggctggcatatttagataacaagtgcctatggtatattcttgatcgatgtcagtcaaatattgatcgggaacgtgtaatgttaaatcattctcaatagtttcttgtgctccggcagctacataagtctctttattatattcccatttgttaatgagatatgatttgccgagtgttacttttacatcgtgtacaagtttactgctctgcatctttttgtcacgtttggcgtagaaagtgactttagttaacagatgcttgaattctaatggtgatttatttgaaaaaggactatttttatttccttcttccgtttgtgaggcgagcacatcaacggttcctgccgaaatggttgaactcaaagccagttgtttataatcatcggataccgtcaaacgatcacttggagcgtaacctattgcatataccgtagtaccgtttggataaggtattgctgtgtcatatgcatcttctttgtagttatcaattcctgacaagttatctgttgagttataataattatagtctgctcctgtgaaaaatgcaaccttgaatgtcccattatcatcgagcccgatcatgctttcactggaacgggtgaaacttatttctatgtttttgttgctaacgggcaaggagtcgtcttctagtatactattgcaactgctgacgctaactgctgctatcaggagcaatccattgatgatgttatgttgtcttattagtctcatagttatactccttttattaattatttccggtttcaacatcaattgtagtccgtcctttaagaacccatggtatcatggttgtatttacttcgattgttttatcagattgcagagtattgaatgcagtaacattgattatgtaataattgttacgtataattccggacgctacgctaaaatctgtcggtgagttcacaaatgtttcatagtactgccaaccaccttcgtaagtgataaagtcattgacggtaacagtcagcccagactctctcaagtaatcaattccggtacttatattgctgtaacacatatctttcatacttgtcgggacctttttgcaggtatagaaagtgccgttaccggataatctgtttttggcttcctgttcggtcaagttggtctctccgtctatgtttttgggggtaaacttggcggcgactttcaagtaggttgccactttttgagcatcgctgaaatcatttgaactctcagtatctatgtttattgtattttccagacaataaatcccttctgtatatcgcttgtcatcttcttctattcgctgaatatcatattttacagcattttctccagcagtcacgttggtggctgtaaaaaagttagcgtcataatttgctgccagtgtcgtactcatcgggaagttcggatcttcattgttcgcttttttaaacgggaagaactttttattggttgtttccagaatataatgtacgtcactcaatttgatataaccgttatctttggtcaagtttacatattctgtatcgctttttgtagtgcaagtcaacaatactttggacatgacacgagtcaaagttgctttgattcgtgtcattttatgctcttcaatattaatgatttcactgttactgccttcagtaacagcctgaccggtcattaaaaaactgttatcttcagtgatgtctcctatattgtttatcagttgttccggattatgatcaggagctgccttgatcgattctatttgtgtatctgtcatattggctgcaacgaatatttttttgttgccaatagatgtatttacgacaaagtataggaattcattttccaaatcttctccggtgattgttttatcttgaatgttggtaccattcgtatccataataaacaatgtgagcttacggcacttgctttcttctgtcgtaccggataatgttttttctccgtcaactgcccgtgtgcctatttgtggcatgctgatagatagcattaattgagcttcaatttgcggttgcatctcctgtctttcaacgaactcatcttgtgagcatcctgaaaaaccggcaatagctatcagagcaactagaagattatatgttaatttgaggtgtctcattatctcgtttatttagagttcgaaatcgttaagctgaatgacccaaccgtttatttgtatgacggatttgattagcgccatattctcgtcaacgaagaatatcatactgtaacggtcttcgcgatccagatattcctgtaattccatatctttataatgctcttgttttagcatattcagatatttaatcatatccagatttttaataagttgttctcccgtttctgtattggtgatattcagctccggttttttatctttcatgagtcgtcctacactcagttctgcaatagctgccggatattcgctgtctgtatcttgtgtgaaagcgcgtgatgttatgtactcttgttcagtggcaaatggtttatacgtcaacatgttgtccggcaacaaagagttgtcatagttcatgtatccgttttcatcatatattgtatacttaagattttctttttttaatgctctggtgacaggctggtcagggtgttgatttacctgtgctacaacaatgcggatattgtttgtgttcttcactaaagaaacttcagtaatacgttctctgctgtttcgggtgaaagcaccttttttaacttctccgtgccacagtgaagaaagttccttttcaacaatatatttgtctttttcatcttccgaacgtgtaggaacggcttcttctcgcagagtttttacctttaattctgtgatttgagatgtttgtggatataacacaggcactgcgaacgactggtcgtctaatcctgcccatgcaattaaatggtattctcccggatcaaaatccaggctcatggaataattaccatctgccagcatttctccttggtctgttttgtaatataccatatttccattgtcgtcaaaagcataaagtgtgacggttcttacttcttgagcgaaagcgtctactttctccatattatagtcatacttgaactttaccaaatatttgatgctgcaatcgccttcattgtaatccaggacagagtcgcaggatgccattgcaccagccaatactgcaagtaacagtatcttgtttactcttttttgtatggtggtcagtattcgtttcattttctttgttttatgcttttgggggagtctgttttgtttaccttattatatcaataaagagaactggtttggaaagggaagttaccccttcccaaaccagtttattgttgtgtgatgcaattataaaatgatgtctaccaagtttattgtccaaggaagaaccttgacttctatattcagacttgctgggtccggagtgggagtcggagtcggttcgcctaattttgtaatgcttgatacattcagcttatatacgttgtttctaacgattgttttattgcttgcagtatttgtgtaaatatctgcagtgtagtagcatttaccatcttcgtacatcttgataggaactcctgctgctctgaaatcagcagctttgctttcagctgttaagccgtttgcagtaagcatatttccgaatttagcggctaatgattcaaaacttgtatatacttcattttctgaagttacatagaaagtagcagcttctgtttcctcaccccatgttgcaacagcttcgtatacaacacgtgtgttgtttgcatctttgttttccaaacagtatgtgatgttactatttgcatcgggggttgactcttgcacattaccaacaatatctttggatacgtagtcccaagtagctttggctgcgtcatatgcttggaagaagtttgattcgattggagtcgtatttgccagtacataagtatcttgctgcaaattaacgaatgagtattgtcttaatgtaatattcagttttttaccatatattcccggagtaatgttttcaaatgcagtagtttttgactgttctaccagtttggcggctgcacgttcaacattaattctggcagttgccacttctcctgctttaacagttactgtttttacttcgcccttttcattactcattaagaatgccccgggtttagcaacataacctgtaagtccgtctaaagtgctaacgtaattagcgcttgctgtcatacttgcatagggtgtcgtaggttctccttgtaggtttaaaataacgtaaatgctagcttctccggcagaaacaggaataccatctttcaaatataatgtattatcattttcgccaattctgaaatctttatattcataagtatgtatatctccattgacaattactttagctgtttcaaaagtttgctcagaagtcagcccctcttctgttgcgcgagttgttactggataagaaatgcctaattgtattaaagcgttttctgtaccttgcacctgaccgttatctacggtttcatcattttcgttgctacaagctgtcatggcaactgctgccaaacctgctaataataagtttctaactttcatttttgttttgagtttaatgcgtgatgttatgattgtttttttgtacatactacatttatatgtcgttatgttgattttagagtggaaaagagtcatctaaaggatgggggaccgattgttttataaaaaacatcatttctttttctgatcggaagcccttatatattataaggtgaaataactaacttccagttggagggattttgtttgtttcttataggcaatgtttcttttatttgtttattactaaatttttgtcttgtttgttttaaggaatctttttgttccttatcgacattgcaaagttatgggagaaatgtaaaactgttgattggtgtttttttcaattttcaaggtgaatttttcaatctttcaaatgtcacttttagggtgggtgaattagtcattttgtgaatgatttgttgaggagatgaatattataccgcctttccttttctttttccactgtttgtattatatattttcttcaacttattctgcgcaatagaataaattttgcaactatttaggcgggatggaatgatttgtgtctttttcattctgttttgaatgatttactgctgctgttgccgtgttcatagcagactgcattacgtggaacaggtggatgatctcatcgttacaagaatactttctcaccttagtgaggattaattcttatcaaggtgagaatattttctcatagtgatgagtattttttctcacaacggtgagaattgtttgagaatttaatgaaacgtatttcgctgtgtattagttgagtagcgagtttgtaaccgtgttggaaaagttcggatctgtagtagcggagactaatatttcggatgcggctgctttgaaataaatccctcaaattggcaaactgaaataatatattaaatccccaggaaaataatgtgagccgttacttgatagatgagaaaaaacgcactgccttctcaggtgatgcgtttcttgatttggggttaaaattttaattataaatcataggggggaacaaatactgtttgtctgtgttattgttttttgttattctaagggataattttgtttcttctttaattctttcaagttagcgtctgcttgctttatgagaccggcagctttagctgcattgaaatatttttcggctgtgtctaagtctccttctatcatagcgataatgcccaggttgttctgtgtctctgccgcttttggatcagctttagccagatatctcttggcagttgtcatatcaccacctttttgtatctccattgctccggcattgaggttggcgattggatcatccggaaacattgtagcggctacctggaaagagtggttgaattcttcgcttcccggttcacaactttctgcaatccggtagatttcctgcaaactcaacaactgcgggcgcttattgataatttcttttgattcttcaaggctgaggccacgaactgtataattgaccgtataatctgaatgacggagtgcaggataacattctgccaatatatattgatatgtctgaggtccaaccagattagcgatatcgcgttccttcttatcaatgtttatgctttcatcatctatcaggcgaagaacttcctcctttttctctattgatgaagcggaaacaaatttgcggaaacctttccagtcctccggggtatattccgaagtgatgagcttcttatcgaaattgtaataactggtcacataatctacaagagcctgggtacgattctttgccaaacgggtattgttggcgtagctgccttcgggtgaagcgtaaccgtgaatctttatacgggtaagagttgtatatttgtcgttgcgcacggtatcgattgttgcacgtatttttgccaactcacttgtgttacgacgatactccggatagatgatgattttgttgaccgggaaatccagaaatgcgcttccttctactgcacgatattttatgtcttcagctttaggagtgatataggctatggaaggttttactttcagtggtaaaatgttcaattgggtgattaattcaccgctgttctcctccaggatgtcacagcaaccgcataggtcaatattcaatttcatatttgcattgcgcatccatgcttcgaacggcatttgtaccaagtagtttactttttgttcctgatgctgtttacgacgtaaaatggtataagtgttttcgggagctttatggttacgctggttgacgatgtcgcgcttacgtccgtataccacaatagaagataacaccttggtctttccgtttgcctcaagaaatggagtcaatgtggctacattgttggattccagtttcaggttttcttttagaacaatgtccagattgatagttaatacattgttatcttcactgcgtgtgatagattctttctctatacgcacttgatctttatagagagtctgtgctttcccgcctaatataggcagcaggcagaagaatatgcataatatctttttcatatttgttttgttttaaaataaatagattaaactgacggcggcttttgtaggacctacatagttcttatgtccttccttgactttttcaccgcacgtcttgcattcgaactgctcatacttgacacgcgcgtaacctataccgatatttccttcaagattccagtgcttgcccagaatccattgataaccgtaggaaacgcccaatccgtaaaagtgtcctttgaaacggtggtctttcaattcgggccagatgccccatggcatatcaatggctgctgcctgataaacgcctccatgaaggtgtgcacctacgaaatgaccgttgaatttatcacagaaccaatatcgaagctccggttggaaggcaagcatcttcatcatcttctgatctttgtatgtccaagggttgtagttggcatacaagtccagagttaatttcttacttaaaccgacttcggctccaagattgataattttaagcgcgtccattacgacgttggtttttactccgactacctgactatataataaggtagaagcaaacagggtaacgaacaaaaataagattcttttctttttcatcgcatgatgggttttgtttgttgatgttacaaaagtaggcataatgcagatagctgttgattggcagattcatctttcttgcctttgtcttcaatggaaattgataagtagggtggtgaataattcatttatgggtggttgatcattcgttgttgttaattggtgtttttgtcttttgtgatgaatgatttgcatgtgggtggtgttttaatacttgtagaacttagtcaatcgcttgagtaagctgtatttcattcgttaaagagtggtaattcattcatttttcttttcagaaagttttccttattgaataaaatacctatgtttgcgatgtgcaaacgaacaaggaaagataaataagacaacttaagtttaagattcccctcctaaggaacatgaataaataaacaattaaaagtgtaaaaagaccgcgaactgataaataacgattcgcaagcagattaaatgaataagtaaaatttaggaggaactaatatgaaatcaattaaattctttttcgcatgtgtattggcattaacttttgtagcatgttctaatgctgaaagtgacagttttgaagataatacttcaaacttcgaatccatgaaatctttatatggtattgagtcggcagcttacgatcagaaagctgaggaaattccttctgttactgcagaggaaatggcaagtgtgctggaagcgcttcgtcagaatggtaatactgtccgtaactgtgaatcggaaacaacagaaggattttatggtgatgctactgataagaaagcggtgaaaatgcttgccgaatatcaggctcgtacaagaagtggcgctttcgttgagcaattcgcattatgtgtatcattgaactttaatatagataaaggtgcggtgtattatatcggtactacttactcttcttcgactgacttattcagttggcagggatatggcgcttctttatcaacaactgctgacggtaacagcatcttcaattctactacttatctttatttccgtgtaagcgaccaggggaactgtgtagtaaaggtaccggtaaacttcaaaggtagctataactttgctgccggtcaaggaacttatagctttactctgaaagctgctaaataatatcataagaatttattgcatttaggtattagtataatatatattattaaggagtgtctgtatgatatgagtcgctcctttcaataaaaaagaggaaccgagcagcaaacaatataataattggagattgattgcgtaatgaacaaaacaaacggcaaaagtctttctatttcaaaagaataggagggcttttgttttattgtgaattatttctaaaaaatatttgttatgtgatttgatgataattattttgtctacctttatcgaccaatacacatgaacaaaatactattaagatatgaggaaattcttctttttactactggtattgtcaggtattttccctgcatattcaatagatactcattggaatctggaaccggtagtaatcaaaaacggagtcagtgacaatactatttataatgtttgttatggaagtgacggttttatatggctctctactgataaaggaatttcacgttatgacggatttagatttcgtgactatcccctcattatggggattgattctctttccactcctctgcatcaagctgtgaaaaaactttgcgaaggtcccgacggtttatattatgcgttacttttccaaggtggaattacttgttttgataaggatattgaaaagtttttgccggtacgttttgataagcctctggaactgaaagatattctggatttctgctggaatgacgggagtttgtatttggttacttcacaaggtttatttgaatcgcgcattgttcgcaagacagaaggaaaacatgattttgtgttatgtcttttgaatcctgagcctttggtaagaggaaaggttgctcatctttgtagtgatagaaaaacaaatttgtatttctctgttaatcagaggaaagtggtacattatgatttagtggcgaaaaaaacttctttgattaaggaatacagcgtagtaaatagattgtttttaaggcatggttatttatggatttgccgattatgggatgacattatatgttatgaccttaaaacgaatgaggaacgtgttatctccatggaaggaaaagatcagtctgaattctctaattcttatgttacggatctggttttgaaagataaccggactttttatttgacaacttggaatggattgtataagttgcgcttcgataatgacaatctgtgtaagagtccgtttgtgttgactttgctgacgaagaatgagaaggcattccattcgagtattgagaataaaatgaccagcctgttttgggatgataaacaacaaattctttgggtaggtacatttggcggtggggtcgtgaaatttgatattagtgatagtatgtacagtagggtacggcaggattttggctctcgggtggatggtatggtcgaagattcaaaaggatatgtatggttgaccgttagcgatggagggattatgaaaagtactactcctgtgttttcgttggatacacattttgaaccttggaaaaaagcatcagacttttccggacgctttcatatatataaaggtaagaacgggaatatctggttgggtaataattggggagagattgttatcattgatccattaacaaatgaggtggagtcctttcatctgcaaaataataaaggtgagaggatacaaactgttatttatagtctttgcctggactcatggaatcgtttgtgggtaggcacttcaaatgggttgatgcaggttgaacttgaaactcacgaatgcaagagcattaaattgcctgaagaaataaagaatgtatttgcaatagcagaggataaagaaggcaatgtgtggattgggacggatagaggtttgaaaagacttgaaacggatggagtacaaattagagtagaaggaaatattgagagagaaaatggactggaagaggcggctgtacgaactatttatgtaaataactataatcagatttatgcagcttatttgaatgtcgttatccgtattgatggaagggagaaggataagttggaagctatatacactttgcaaaacggactgaccaatggacatgtaggctgtatggtagatgatcgtatcgggaatacttgggccggaaataatgtcggagtgatgacgattagaaatgggcaggatgctttctataattatctttcggtaggtaattgtagtgcggtatgccgtttgaatgatggacggttgctttgggcaaattcttggggattgattttctttgatccctctgctacgaaagcggattgtgaaagaaggcagctgatgctgacagatatagcagtgggtggagaaacgatcttggctggggagaaacgaaatggacagttgattctttcaggttctccggaacaacagaaaaagcttgtattcaattctgataacaatgatttccatttgttcttttccgatttacgttatgggatggctgaacgtaagatagcttatcgattacttcccttagataaggattggagaatggtgccactttcggaaggcttatggttcaatggactgtctgccggaaaatatactttgcaggcgaaacttgtatttccggatggtaaggaaggggatgtgaatgagattcttgtggttgtaaaagataaatggtttcaaactatttgggcttatatagcttatgttttgttacttgtcgcattttcttgttttttctacatttattttaagaagaaagagcagcgtaagcagatgcaccgtgaccgggagttggtattgaaagagaacttgagcctggagaagatgaagcagactcaaaagaaggagatagaagctttgcggaacggcttgcttatgttgtttgtacaggaattgcgtactcctctttcgttgatcatcgctccgttgaaagaattacagaaagacaattcccaaatatcgaacctttctttgcaggttgcataccggaattcgcttcgtatggttgatgcttgtgatcaattactggctatataccgacaggggagtccggaaacgaagttggaagtagctccctattcggtagaaaagatgattgatagtagtgtctttggagtccgtgatttgttgaaagtatatccgattgattttcgttgcgagaaaaggctcaagaaagaactggaattctatgtaaataagaagaaaatagaatttattattcataatctgttgacaaatgctttcactcatacgcattatgcaggaacagtttatttttctgtttgtgaaataatagagaataatgtgcattatgtcagtctgatagtagaggataatggaatgaagaaggtgagaacttccgagcaattaatgagtgagaacgggacattggataatgatttatctgccgcacagttaggcttttctattatgcggcagatgatagaggcgcatcaaggaacaatctcattggaaagtgttgaaggaaaggggacaaaggtaacggtgaatcttccggtagatagagccgtcctggaaagtgagccgaatatattgtttattgatccggaagaactgcctgaagtagaaccggaagtgttggatcaactcaaagctgattcgaaaattagcgaaaatatagggagacagggtccaatactttttccgggagtattgtctcctaaagaaatggcacaatctgtgacaaatgaagagaaaaagacaatattaattgtggaagatcataaagatattcggctttatctgaaagttttatttgggaatgaatataatctgttgatggctactaacggtcaagaaggcgtggatatggctatgaaagagttgccggatttgataatttgtgatgtcatgatgccgataaaagacggatttgaatgttgccgtgaagtaaaagaatgtccggaaacttgtagtatcccttttattatgctgacagcgaaggtagaggatgacgatattatccatggtttggagttgggagcagatgattatgtgttgaaacctttcacacccggtattctgaaagcgaaagtcagtaatttgattaatggccgtcagacgttgaaacaaatgtatgcaaagttatttaagttacctggagcagatgccgttgacgcagatgaaacagagcagccgggaaaagaagaagcaaaggcagaagatccatttatcacttccgtaattaaaattgtagaggaaaatatctgtgaagctgactttagtgtgaagaagcttgcatcggaattaaatatgagtcagccgactctttaccgaaaagtgaagcaaagtacggactatacgattatagaacttatcaggggagtacgtatgcgtcgtgcgggtgtattgttgaaaacgaaacaatacggtgtgcaggaagtagctgaaatggtgggatataatgatattccgacgttccgtaaacattttgtagacgcttttggtactactccttctacttatgaataaaaaaatgagtacttttgcacacgaaaaccctaaaaacaggaattagagtgcaaaggtatttcatttatttggcttatgacggaaccaactatcacggttggcagattcaaccgaatgggattagtgtgcaggaatgtctggtgaaagcgttatccacttttctacgttgcgagatagaggtagtgggggcgggtagaacagacgccggagtacatgcttctttaatggtggctcatttcgattatgacggactattagatacagtttctgttgctgaaaaattgaatcgtttgttacctccggatatttctgtttatcgggtttgccgtgtaaaaccggaagctcatgcccgttttgatgcaacagcaaggacttacaaatattatgtgacagcaataaagtatcctttcaaccggcaatatcgttggcggatttatagttcgctggattatgaacggatgaacgaggctgcacgtaccctttttgaatatagcgactttacaagtttcagcaagctgcatacggatgtaaaaaccaacatctgccatatcactcatgccgaatggacaaaagtgacggatgatgaagctacttgggtgtttaccattcgtgccgaccgcttcttgcgaaatatggtgcgtgccatagtaggtacactgattgaggtgggacgtggaaaactttctgttgaagatttccgaagaataatcgagcagcaggatcgttgcaaggccggaacatctgctccgggacaagccttgttcttggtcaatgtggaatatccggaaaccttgtttatataactaataacttataacaatcttttatgtggttattattagcttttctctcagccactttgctgggcttttatgatgtattcaagaaacagtcgctgaaagataatgcagtgcttcccgttttgtttttgaatactttcttttccagtcttgtctttctgcctttcatcttgctgtccgtgtatgagccggatttgttgggaggaacaatatttaatgttcctgttgctggttgggaacagcataaatatatcattatcaagtcattcatcgtgttatcctcatggatattcgggtattttgggatgaaacaccttcctatcactatcgtgggacctatcaatgctactcgtccggtaatggtgcttatcggagcgatgttggtatttggcgaaaggttgaatctctaccaatggattggggtgatgctggctattgcttcttttttcatgttaagccgttcgggaaagaaggaaggaattgattttaagcataataagtggatattttttattgtactggccgcaataacaggagctatcagcggattgtatgataaatatctgatgaaatctctgaatccaatgctggtgcagtcatggtacaatgtctatcaggtttttatcatgtgtcctattctgcttctgctttggtggcctaaacggaagtctaccacaccgtttcgttgggactggacaattatcctgatttccgtatttctttcggccgccgatttcgtttacttttatgcattgagttatgatgattctatgatttccattgtttcgatgattcgccggggaagtgtaattgtttctttcacttttggagcactcttcttccgtgaaaagaatttaaaaagcaaagcgattgaccttatactggtgttaatcggaatgatattcttatatttggggtctaaaagttaaaacggcagattcataatctgactattataggttaaataagattgatatgaaaataaatagactcgtttccgctatattcttttttgttgtaggattgttttcgctggcttctcttcaggcgcaggaagctaaaactttgtttgtgaatatcccggattcattaactcctttgcttactaaagtaaatcgtgaagattgtattgactttttggaaagcaagatgaaagcgcaagttgaaaaccgttttggtaaaaagtcggaaatgacagagcttggtacggattatgtccgtatgcaaatgtctccgcaaacatcttggcagatgaaggtgttggcactgagcgatacgacgaaagtggtatgtctggtctctactgcttgtgctccggcatgtgatagcagtctgcgtttctatacgaccgattggaaaccacttgcagattctcagtttatctctctaccggtgatgagtgactttttgagtactcctgattcgacaactatttatgattttgatgaggctcgccgttctgctgatatgttgctgatgaaggctgattttagcaaagataattcggaactgactcttacattgaccactcctgactatatggcaaaagaaacggcggaaaaactaaaaccgttcctccgccgcccaattgtttatcattggaagaatggagttttcactaagtaaaatctccattctcaattttctattctcacttttttaagcattcattgatgaatgctaccatttccggtgtatgttcttctacgctttgaagcaatttgaattgtgcttttgtacgtaccagattatgttcgggatatttaatcttgtagtaagtatctccattgatataatcggcaaggaaacgtacacattgcatataggggaataaagctgcagcatagggaagattctctatttcaataggagtcaggaatgattttgcaccttccagatatcctttggtgaatgctttgaatatttccatattgaagtttacacgatcaaggtctttgtcgtcttcatcaccggtgttggctcccgtgcgtaggaaatctccgtaatcagagaatatgaaactaggcattaccgtatccagatcaatgacacaaagcacttttccgtcttcatcgaacatcatgttatttacttttgtatcacagtggcatacacgtttaggaagtttgccttcgcggtacagacgttctgccttgcacatttcatccgcccgtttttctatttcatccaaataatactgcacttctgctacgcgtccggctgcgttggttgcaacggcgtcacgtaattgtttcaggcggaactccatattatggaagtcgggaattgtttcacctaaagtctcaggaatatcagccagcatagcctggaagttaccgaatgcctgtccggcataattagaatattccggattgacggtttcgtatgtcttggcgcgaggaatgaaaaccattacacgccaatagctgtcgccgtcgaaccaataagtcttaccttcttcagtagaaagaaaggataaaactttacggtcaatatccgattctccggcttcggtcagtttcttacggatatggcttgtgacagcggcaatattggattgaagcatttccacattctgaaaaatggcatggttgatgcgttgtagaacgtagtcgggagcatctgtttccttggtgtttactttgtaagtgtcgttgataagtcctgcacctagtggcttgatttcttccactgtgccttgtactttgaatttagcaacaatgctagataaatctttcatgggtcttttctttaaaatttataataaggttattgataatcatatttggctacttcattagcctggctggccgaacggacagggactagggtgaagccccaactataatcacggttagccggtatctgatggaagggttccgggcgtgctccccagctgtcatatccacctactccttgttgtttcatatcaacacagacttctacaaagtctctcggagtaatatcgttgacgtgatgcattcttctcaatacattacgcgcggccttttcgtcatggttggcaacctcttcggggctgaagttattccattgataggggtggggaagggcttcttccgaatcgaaatcttcgatagagttgcgtaaagcgttgaagccgataaggctgtcggcaacaatagccaggccattccctttatcaggagatagagcaatccaacgggtatcggtatggtgtccgttttcctgcggacgaacgtagttgaagtacatcttatctgccgttgtcttgtatacgccaacaagggtaccatgattacggtcaatatagttttcttccggaccgcgaccgaaatattgtacattgttcatttgggcgggcaaacggaagcgtacaccgatacggggaacttccagtttggaagctgctttgcgggcagcatcgcttccgggagtaaaggtagccatacgcgtagcttcggaaacttctgtttctgctgcttgcatatccgtagaagtgaattgggcactaacatttacgataccgctcggatagattctgtaagtgacaacatacaagttgccggcagctaacaaataagtggcttttagcgagacaactttattctcagtagtcatcttgacatctgtcacatggaagtttttgcttgattgcttccatacctgcaaacgtttaggagcaccgttaccatagtcattatcattaggagcgcgccagaagttaggctgaatgccaaaaccgtctttgaaatattcagttccgtccactttatatgaagtgactaatccgcttttcttattaaatacaaagtttacctttgaagaagatacggttagttcatcacctgacgttgctgttgtcagtgcaggaccattagctttataaattcttttctctgcctgaatcggaagctggaattggtcgtatgctatttcgtagccggctggtattagcggttccggttctactgttgtcacactgaagtttacaaaatattctgtccccggttgggattttaagccgtttacaggtacagtaaactctttggatgcttgcggagcgatgtctaaagaaacttttccgctttttattgttttgttatttgagagtacgctataatggatctgatactttttcagattggtaaagtaaaaacggttagtgattctgaacttgccggaagcagcgtcaattgcttcaaaaccgacattttgatgtacatattttacttcagccatagccgggtgtggtccgcggtccgggttgacaagcccattgcaaaggaagttaccgtcactaggggcgtttacaccaaagtcacctccataagcccagtattctctaccatttttgtctttctggagcagaccttgatctacccagtcccaaatatatcctccctgaaggttaggatatttgtaaatagcttgccattgtccccaaaggtttccggtggaattacccattgcgtgtgcatattccgaaggagctaccggacggtcgctgccgttcttgcctgtgttttccaaccaactggcacctggatattgcggaacatacatatcggagttccattcccattgtgcgcgttcatagttaacaggacgagccatgatatttttgtctgcttctttcacccacaaatatgtttgatagaagttgtatccgtttccggcttcgtttcctaacgaccagaaagtgacactcgggtaattcttgttacgttcgaacatatttatagtacggtccatgtgcggtttcaaccattcggggttgttgcccaatgagccgcctttgcggaggtcgtaatacataccgtgactttcgatgttagcttcgtcatacacatagagcccgtattcgtcgcaaagttcgtagaaacggcggtcttgcgggtagtggcagaggcgcacactgtttaagttatgctgcttcatgagctcaaaatcacgacgcatcaattcctctgtaacgtaatgccctgttgccggattgtgctcgtggatatttacacctttgagtttcaacggttgtccgttgatgaataagcaaacatacggtttgccgttagcagccttttgttcaattggtttgatctcaatacgacggaagccgacattgaagggaactatttctgtaaacttatctccgtctttgatgtacatcagtaatttgtagagattgggatgttcggatgtccatgtttttacattggggacttctattttcacttcttcaaagagaggaatggtttggttcgcacctatggcggtattcatttcgaaagcagcgattaccttatcggttttcggatctaacaccttatatccgataacataatctttagagggctgtgaggtattgttgcggatatccattgccagtttgaaaataccgtttttataagtatcgtccagcgtggatgttacacggaaatctctgattgctactttgggttgtgagtagatatacacatcacgttcgataccactgatgcgccagaagtcctgacattccagataagagccagtgctccaacggaagattttcagtgtaagtacattcttgcccggtttcacgtacgggttgattaggaactcggcaggattctttgaatcttcgctatatcctacttccttaccgttgatatatacatatacaccagatttggctcctgccaagtgcagataaatgtcccgtccgtcccaatcggcagggatgtctatatcacggcgatatacacccaccggagtcgcttccggcaatatcggaggctgtgggttgcgtgctttgaattcataaccatgatttgtgtagatggctactccatgtccttgtacttcccagttaccgggaacttggatatcataccatgagtctgtactgacgctcggatcagtaatgttgtcaggaagatctttgtaggaatctacaaaatagaacttccatgttccgtttaataaccgatagaacttactacgctcaaatttcccgctcaaggcatcttcacgattgtcgtaagtcataaatgaagaacggggatattctttgttaacagctactacttgcacatcttgccaataaggcttttttgcattatcagctacggcactggttactatcagggaaaatattcccagaaaaatgttagttaataagagggggtgtagtcgaaatttcatgtttctcaatattggtttttcatttcgtttttatttaactttaatatggtcgaatccttctccataaactccgataacagcactttgtgaaacaaatgcgttagggtctatatcctttataaaccggaagataatgggggattcccgttttttagccaatacaaacatcatcttcacttcgcgtccggtataaaagcccgttgcattgatgattgtaacgcctcggtgcggatattcgttgatacgtcgtcctatttcttcatatttatttgagatgataaagaattgtacggactgacgtgcgctgttcaccacctgatcgagcacgaagctacaaatatatagagttacaaatccatatactactttttcccagtcttttaagacaaaataactggaagatataatgatcatgtcgcagataagtacaactcttcccagtgtaatatcccggtacttgtttatgatagctgcaatgatatctgtgcctccggtacttccgttagctgagaaggcaaccccgattccacctccacagaatgacgctccgatgacacacgccatgaaaggctggtcgtgaaggagactgatcccagccgccagtttctggataacggataaaaagaaagtcagggtgaacactccgaagatggttttgatacaaaacttcaatcccagtaatttaagagctaacagcagcaggaagaagttgatagtgaaatacgtatattgcaccggaaagccggtcgcccaatatacaatggaagcaatacccggtactcccccggtagtgatatcgttgggtagtaaaaataccgtccacccgatgccgtacagaatcatgccaatggcaatcattacatagtctctagcctcacggataatgctttgcttagaaggctttggaatagctgttttcataaacgtgattatgataatctataaaatgttgaaacacgaaccaatgaataatccggctttgggggagaagccggattaatttatgttcgtgtctgcaaaaatactatttttattttacgaaagcgtggtggtagccttgtactttattccatcctccacgagtaaagtcgggaatttcaaccggagctgaattgttttcaatagagaggcgggtcagttcagccatgcagcaccattctgccaagtcgtaaacgtccatgtctaaaggtaaaccattctgtaagcagtatgccagacgataatccatgataaagtccataccaccgtggccgcctaccttcttagctgtttcttccagttctttgtggataggatgtttgtatttatccattagggcttttttaacgtcagcaggtacagaaccgtgtgcgttcaggttttcatgattaggaacatcgtttgaatcaacttgtgaaggtctcaggcaatattcttcaatcggatatttgcttgcgtaaccgtctgctcctacaatctgatacatacgactgtaaggacgcggagtcattacattatgttggatcaacatagtcttaccattttctgtgcgaatcaaagttgaagtctggtcaccgttctggaaatccttcacttcttctcctgtttgctttttaatataagccggaccattgacagctttcgtatccattgatactaaagttttcatacggtcaccacggtggatgttaagtacttggcaagcaggacccataccgtgagtagcatatacatcaccacgatgtttctgattgtaatccatacgccagttattccagtatgaaggccagaagtcttccaaattgtgaatgtatgaaccctctacgtgtagtacgtctccaaagacaccttgctgtgccatattcagagaagtcaactcgaagaagtcatatacacagttttccaactgcatacagtgcttgcgggtcttttctgaagtgttgattaactgccagatttcgtccaatgtcatggcagcaggtacttcgatagctacatgtttgccatgttccattgcatacacgcccatttctgcatggtgcttccaatcagttgctatatatacaaggtcgatatcttcctgttcgcatagtttcttccatgcgtcttccgaaccactgtaagaagtagcttccggcattccggcattcttcaggatttcctgtgatttctctacacgttcgggagaaaggtcgcacaaggctacaatcttggttcccggaatatgtgtccaccgtgatacggcaccaggaccacgcattcccaatccgataaaaccgacacgtacggtatcaattttgggagcaacaagttggattacgtcttcttgtccggcagggcgggcaggagtttctactttgataggagcgaaggcttcctgagccttctgttgttgtgtgcagcttgtatggcaggttaacaaggttagtccaatagctgcgactgtgaatagctttttcatcatattttttatgtttttaatagggggttatttgtcgtttttcattttgcggtcaaaaatagtaatttattagtcaattccatataattataacagataattttgtttttttacccttatttgggtagaaaacaggtcttactttttctttcagatttgtcatggtcttaatgcgtttatgttgtgacggtcatatttccgtgtgtacgaagtaaatacacctcgtaaggggtgttcccctatgaactaatgttttttttagcatttcttaatgtttaagtttactattactatttcaaaccaactcaaatataagacacactatgggaacattctcctagaataggaaccactttttagtattgcttaactttttgccttcttatcggctgtttatgtgaagcaaagtcattcttccagtagaatacgttttccatcggcttgtacggcgtataatttggcgtacgtcaatgataccgtcaagggaacttcgaatttgataaaggtagaaaaatagagtaactttccattagcgtctttttccctgagttcgaaagctacagcttcatctccgtttgtaatgctcacttcccgtccgttgatatttccttttatatcctttgttataggtcttatcttttgaaactgggtataatgaccaacatccggtggagtagtatccaatcctatatctcctttcttccggtcttccagataatagaaaggtttggcttttttcggatatttagccatagctttctttgtattttcaatcatttccttcgttacagtatactgatagctgccatattgatcgatctgtgtatctacggttacaaagaatccccatatttcaaaaaactcggtcagatcttcttgtgcggcttcacttgccattcgagcaaacagaagttgtttaactcccggattattggaggatgtccggttctcccgcatgagtttgaacagtctttgccagaaatccgttttgtgtccgcaacgatgatagtaattccatagttgccagttcatacgcatatgcagttctgtattttctccctgataattgctgccaaagttacaccaaggtcggttgagtacgcaatgggcttccgaaagtgtcattcctgtaatatttccttcggagttagtcgttcggttatcggccgctttaggaagattaagctctgtgccgcgtgaacaatattttccaagtttatacagtatgaaattcgagaacagattattggacgactcagtagaactaggccagtcgattgccagttggtgaatgtgtccgatttcatgtgcgggtccccaggcgttatctttggcactcatcaccttgtcgtatagtaatatattttccagataggtatatacgaatgcaatacggtagtcggaagcccacatatatgcaccttcaggtgaaattgcaaacaagtggttattaacctgagtagggcgcacatcttcaatacccattagttcctgctcccaaccgatgatgttgtcccataggttaatagcggacaatatttcatctttcacaaactcacgcagtttatcccggtggaaataaaagataatcttatcaccacgtactccgaaatacttgtcggtggcttttgataacaattcggcatatttggcatttgttttgtgttctttcaagtcaaagaaaccgctgaccgttccgcttcctaatggaatatggatttttataggtttcggatggctggtcaggtcacagttgtacatgacgaataactggcccctattacgtattttgattttgttaatacccggttccagatagtaaacgtctcccgaagcggcggtctgtacatattcctgcggttcccaaaagttcgttctttcttctcctacacattgtattgaaacttcgcgtccataggtatcgccaacaaggacgataatttcgtcgtttttttccacagcaataccggtcaggttatccaagctactgtaatgtttggtcattaacttttccgcccactcgttgatatcactataagcgttgtatttgcggatacgaaattctttctcccattcatcataagcgttgttttttaacgcttcggctatgtggacgaaatatttgcttggcaatttgttgatttcttcattggtgacatcagctttcagttcgctacaagtaatatctttgaatacggtcaataacttagttgccaaagtgttatcctcattctttttaaagaagtgcatttcgtcacaactgacaaagttaccaagtccgcttttgacaacaaacttaacgcctgtggctttcatccctttcttgaatacgattctgctcggagtatctttcattttgaagtcataagttccttgaagcgtatatctttttctatcggaatcggtagaggtgtaaacttcaacctcaccaaaattaccattccctgatcgggtataataaataaagtaattgatttccgtatctcctttgaagaaatattccaaagtgacagggaaggatgtattactccatgaactgtgataatgtgactcgaagctgattccttgagtaaatttgccatcgtatgatttgtcaatgtcagatccgggctggtattcgctggcttttcctccgtacggtataatctgaatatcttcgggaagtactacatcttttgtctcttcctcttcttcctcgatgtcaggtataggctgaggcagtgttttgtcgttggaactgcaagaaagtgttgcattgaaaatagagagaaatagaaacaggagggtaaacttgtggaatgttttcatataagtctgattgtgttattgatatagattgtgcgttataaaggtaataaaaatggcaggcatatattacctgccatttttataaataattatcgtgaaatgcaacttattctttattcacaagaatacgttctccatcagcctgcacggcataaatgcctgtacggattaaaggaatatttctcggtacactgaattttaagaagttagagaaataaacaacttcgcccatagtaccgtctgttgattgctttcttacttcgaaggctacggcttgttctccattcttaattgtgatttcacttcctgtcacagatgccaccattgtataggttggagttttagtaatcttttcattgttctggaactgggtataatatcctaagtctccaacctctttatatcggtagtcgccggatgtaaaatctgaaattttacgatcttcaatatattgtattggagcggccttcggataattctgagttttaatccatgctttagtatctgctatcatcttgtcagtcactgtataagtccatgtaccgtattgttctacttttacattatctacagttttgaagaatccccatgtttcgaagaaatccgtaaggtcttcctgggcagcttcgcatacagctttgacgaaagccaattgtcttgctcccggatcgctttctggcacatctttatatgttgtacgcatgatatcgaatactttaggccagaatttagcttcctgttcgttacctttacataagtcataatagatccatagctgccaattcatacgcatgtgaatctctgtatcttcattctggtgagtagaagtacccatattccaccatacctgcttatctctataaattgcattggctaaagatgtcaagcctcgtccgcgtgacttatattttcctaatctgcgaattacgtaattagagaacagattgttggatgattcggtggacgacggccagttaatagctgcttgatgtacgtgtcccatttcgtgggcaggtccccaagcattatcttctgctgccattacattttcacgtaaaagaatatttttcagatacgtatatacgaatcccatgcgataatcagatgcccacatatacgaaccttcaggagaaatggcaaacatgtggttattgatttttccgtcctgtctgtattgagagattcccattaacgattgttcccaaccgacaatgtcatcccaaagatgaatagcggataaaatttcagtcggagcagcatccaacattttcagacgatggaaatagaacatcattcgttctccacgtacacagaaatatttgtgggtggctttactgattaattctgcatatttagcatctgtcttgtgttcttccaaatcgaagaaaccattaactacaccgtgtcctagaggaatatgtattttgataggagcagggttgttaagcaactgttctccatccacattgtacataacgaacaattgaccgggaccttgcatttttaataagttaaccccttcttccaaagagtaggtcgttccggttgcttgtgtttgcttgtagtagtcagtggagctaccgcttgtatagacattctcctcccaaatacattgtaatgatactttttgtccttccgggatattacctactaatactatgatttcttcatctttgttgacgtagattccggtcggattgtctagattactgtatttctttgtttgtagtcttgttgcccagtagtcgatattgctatatgctttatattcgcgtatacggaaatctttctcccattcgtcataagtgttatcttttaaggcatgggccacacgtctgaaagtttcactttccaatgcatcgatttcttcgtcggtaactccttctttcaaggaactacaagtaagatctgtaaagacagtcaggagtggatcattcaaatctctgtagtttgctttttcaaaaaactccatttctccacaactggcgaagcctcctaaacccgtcttaacggtgattttaactttagtggctttgaccgttttagttagtattccggtcttgccgtcaaacccgccctgctgtccgaaatcataagtacctgcaagaacataattcgggttatccgctgtttgaacgtaaacatcgactgctccgaagtttccgtttccgtttctaggataatagataaaataatcgacttgtttatctccttgaagtgtatattctagatctataggcaatggatgagtcgtattatcccaaggagaatgataatgatatccatcaccttgtgtctgtgaacctttgattccgtcgaatgtcttttcgatgctccagttatctccttgtgagatagcatttccacttactatggctatttgagtgtcgtttctgaaatcaacatcattaactccatattgggttaaattaatggtataattgcccaactcagatttaacagctaatttggcataacgttttgtttttccttgattatcaaggatagaaagcattattttatcatcctgttggaaagctgtagcccatttttcgtcggaattgacactccattggctggttcgcagatttgtttttaccgggattgacattgtagtgcttctaaagtcaatctctttgttcaggtcactactgctgatttcaaatgtatttggaatcagttcactctcatcgtccttacatccggtatatattaaggatgttattagacataagaagtatgttaaatataaatgtatatatttcataagttattggatttgtataggaaaccgctctataaataataagaacgtttcctatgtattaactttagtgattacattccccataatttaagttcggccattccccaacatgcataccatgaagtactacctggctggaattctcctatacaatttcctaaataagactccattactgtcaatcttagatagctgaaaggattaggcgacgtaaatacttttgaggtatatgtttttcctccttcacttgatgttggtaatccttcgtttatttcgacaaactcattccagtttgttccgtcattactagtaaataacttaattactttaggtcctgagttattccaaccttttgtaatatactcaaacatgatagctctcatttctttacctaaattaatgtcaataggttgtccatactgagcatttccgcttgctgattgatatttggtttcataagctgtactggtatcgtcatcgtaaagaaaacttagtgaattagctccacagctcaacggatcagtaattttatctgtcaagtcaatcttatcatccaccatatcgaacatatacttcaagattacataatgttttttagtgtccgaggtaatagtttcaagatcttcactttgttcaagttgtagtggaattaaataagtcgcccctttagtcaatttagaacggtctactactaaaaccccgacgctttcactaattccggaactgaatatcaaatcttccagttgataaaatgctccttccggaactgctttgtaatctgttccttgggccgtattgtatgcatctatttctgtttggtcagtgctggctgttataccggccgtaaaattccactggttgatgactccggatgtcatggagactttgatttcagcaataatttcttcttccttattaattcccaggtctatcattgtggatgatttctcaaatttgatacctagctgtttcacttgaggtttaagaattaagtctctttgctcaaaattgacagaatcagttttactggttaagcggataggcaaaataaagatgctgttggcattagcttccgcttccacctgttctgttattttttccggatttaatgtaaactcttctattttataggtatctgaggattcgaaactaatatccttattccggaaagtataacaatcactgttcaatacaacatagttgttgcctttgtaacgtgattcattatcaatttcggtctgagataatgtgcttagtctgacttgggccgtagcggaaggatcgcttccggatttgactacagtaatagaatattttacttgttgtccatcgttgaagagtaccagatcgttctgtccactattctttaaataaagaatcttgttgtactcttggggtatcagttcttggtagtcagcttcttcacatccggtaaatgtggcgagtgaacccaagaaaagaagtgagtataatatttgtttcataatttgtaaacagtttaaagattaatattcgggtgcttgaaccatttgtggattcttgtatgtttcgttagcaaatataggtgccagatacatacggttttcccatttgtaatcttgatttacaataacaggttgatttaactcttcgaaagtaggttcttctacttgttccatattcaaccctttacgtacgccagctgcaaaaacttcaggggcaatcatccaacgtcgtgcgtcgtaatagcgtagaccttctccccatagttctacaaaacgttcgttgcgtatccaatccatggccggcatatcattcagcatttcttctgttacgtctggtataccggcacgttcacgaactacgttcagatacgtaagtgcttctttgggtctgtctaaagctgccaaacattcggctacactcaggtaaagttctgccaagcggaagagaggacgtggatagcttttttcgttgttactccagtttgtaccccagttcaggtcgggttggataaatttctttgacatgtatcctgtgacacagtgatcacgggcgaattcagttctgttccaaccttgtgcttcgcctttcttaagattgagtaccagaggtttgccgcctgaaattcgtgggctgtattggtctccgtcaaatgaaagccatgcatagaatcgtggttcgcggttggtatttaacttgataatatccgcattgcttcttcctgcagattcataccatgaatcttcttctgcgaaagtccctttattggcagcaattcgaggtaattctccttctttggtatagaatcgctctacactgtttaataaaggagagtagccgctatatccacttctccaagggcctccgtctacttttaccacgtgtactggtaaagaagccattactacaccgccgtcatctgcaagtccccatatcatttcacggttaccatccgagtaacggctagttacgagataacgcatcaaataaacatgttttttgaattcttcggtaactccgtctacgggaacatcaagctctcctagattaagtccttgattacccataaggattgcactttctttagtagtcatcagtccgcatccgccttctccttctgcccattccagtgcgtctttacaagcagtcagtgcgcgttcccatttatcgggatcataaacctggctgactaattctttcccatatcccggtgtttcgaaattcttgtttttccaatccggataagggaatttcccattccataagtcagaagctgcatagagcaacaagcgtgcttttactgcttttgcaatagtggaagttgcacgtccccattccgaaccgatacgggaggccggaagatctttagctgcttcgtccagtttcatggaaatccagcttgttacgtaatcaaagtgataacgtccgtgatattcattgttcggtgtatccatatcaatgtatgaatcagtgatagggcacgggccatagtattctaatatcaggaaatgatagtaagcaattaggaaattggcttcggcagtccattctcttttttgtacttccgatacatcgagggcatttggtaattgggacagaaacagataacattgtccgatatagcggtagatattaccccatttccagtctccgggagattccggagtcagcagtccccaaccggcacgctgtccgctgtgtccccataattccgggaatacaaattcatcagtagatgcagcttccattccggtataagtaattgggttggatgaacctttgattcctgcatagcatgagtagaggaagccaagtgtactttccggctttttaacggcatctcccagacctgcttgttcgggaggtactacatctaggaaattgcaagatgtcaggcaacacgtagagagtattaacagactacccatcttttttattttatctataagtctcatatttatctcgtatttaggttcatatattagaaattaagttgtactccgatgttgaatgtacgctgcaaaggataagcattccatgatagttctgggtcccatagcttgaacggactgaatacggctatattgtcaccgttcaggtatacgcgtccatatttgaatttatatcccagttccagtgtcttgaaacggatgaaattaccgttacgcatccagtaagtactagctactgtattattggctgtttgtgaactagtcaatcctaagcgcggatatttagcatttggattgggatttgactcagaccagtagtcatctgcaatgaattgcatgacattatagtcactttggccgaatggtgaaataccgctaatcatgatagtgcgtttagccgacccattgaagaatacaccgaaatcgaattttttataggttacattcattcccaaaccatattggatgcggggggtagttccataaggagagatcattacttggtcactgccatctattttaccatctccgtttacatcacggtattttatgtctcccggtttaacagtactaccaagattctgtgtcgggctattatcgatttcttcctgactgctgaataatccttgggcgatatatccggttgtgcggcttaacggtttgcctgtagatgttttccatacatacggataaaccggttcatccaggttgacatatttgttttcagtatatgtgaagtttccacggaaatctacatataaatcttttgtgaattcttttctccagtttacacttagttcaataccccagttatcaactttacctttattgctccaaggtttagctgtataatatccaagagattccggccatgcttcgcggtggagcaggatattgtaacgtttctcattaaaataatcggcagtaatagtcaactggcggaataattcgaggtcgatacctatatccagtttctttacgcgttcccaaccgccattaacaactgcataattggttactaaaggaccatataaggtatagttcatatctacaccggtagtgaagcctatgttattgagcgatacctggtcgatgtacaggaagtgttgtgcaccggcagaaagtccggtttcgtcactacctaccagaccataagatcctctgattttcaggttatctatatacttggtcatcggttcaaagaacttttcgttactgattacccagcctagagatacggcggggaagaattcgaaacgttctttcttggccagacgttctgttccgttataaccgaaattcagttctaccagatagcgctgaccgtagtcgtaagtaaaacgtcctgagaatccttgattgcgttcgggtagtacgctactacgatattcacgttgcatatacatcagcattcctgttacatgatgtagattgaactggcggtcataattcacgcgggcgtccagatagaaagtctggtcggaagctttgcttatatctgatgttttcagatagtcagttcctgatgttcccaggcgttcaatttcataatcagtaggatttgaagggttataacttcctcctttaataccataataataaggttcgatcgtccggttgtaggaagatgaagcccaattcttccaattgaccattgcttgtacgcttaaccccttagttacgaaatcaagtttttggttgatttttaaagaagtattgagtgtgttctcattatattccttgaatgaactcaacatataagcatacgggttggtacgtaccgaagatcctgtccatatagcattaccaaaacggatatgtgtgtctccgggttgtgccgggaaagtaacggggaagttaataggattacaatacaacatctgagcgaataaatcggaagtactgtagttcggtcccttcttgttacgaatctgggcgttcatgtgtaaatcgattttagttgtagatgttattttgtaagagatattgttttggaaattatatccccaattgtttatattattattatacgaatatactttctttgtatccagcaaacctgtatcgtgattggcttgcaagctcatataataagatgcttttgaaccaccgcctgagatgttgacattggcacgctgattcatattcatgtttttgaagatgacgtctttccattgtacatccggataaatgtaaggattaacttggttgcgtgtgttgtcgatgtcaagttgcgaatattttggggtcgctcccggattacgtgtcaattgggcttcgttgtacatttccatccaagtggcaccatttacaaagtcggggaagttcatcggtttattgaaagagttctcaaccgtgacgttaattctggttttctcgttttctttaccggtcttggtagtgatgagcataacgccgttggcaccacgggcaccgtagatagcggtcgcagaagcatctttcaaaatagagaaactttcgatcgtttcagccggaatattattcaggtctgccgtagaaatttctacatcatccaaaagtattaaaggagtggctcgtccgccaaaggtactcacaccgcgaatgtagaattcggaagcggcacccggttcgccggtcgaagtcatagaaataacacctgccagttttcccgcaaaggaggtggtaagcgaagaacttggagctttcagttccagacctttcacactggtgattgaccctgttacactgactttcttctgtgtaccggcacctactactacaacttcactcagcagttggttgtctgattccatctttacgttgatgacaccaagatcgcctacatcgactgttttctttctgtaaccgatgtaactgaattccagctgtgctttcgagccgctgatagcaatcgtgaaattaccatccaaatcggtaattactccgtccttctgtcctttcactacaacagtagcaccgataaccggatcgccattttcagcgtctaccaccgtacccgtaacggtacgtttctttttgggttgctgctgtgcggcttcctctttgtttacctttaatatgatctcgttacctttgatcatgtaggtgattccgctacctttgaagacttcttttaaaacttcttcaatagtcccttcacaatttagatttttgttggttgtgtttttcaagtctgcagcattgtagaaaaatgtgtaattactgtttttttcaattagctggattgcttgtttgatagtcattgcttgcccttttactgagattactccttgtgctcctaggatgttgagcgggtaaaaaagcaacagcaatacgatatacttcagatatcgttgcttgtaagaaatttgaatttttctcatgctttagcattttagattagacataagtttaattattatttttttataatgattttatttgcatgttcttctttattcaggtttaatgtgaaacaaattttgttgactacatcttccaatggttcgtcatagcgaatgcttccggtaaatgctgattcatgattgataccttttgctaatgtgacgtcggagttgtacatttgattgatgatactaataagctcttgcaagggaatatccgtgaagttatattttccgttttcccattttatattagtaatctgttctactctcatttcagcattacgcggattgtatatcactctttgtaaaggcttcattactgttttttgtccggtggattcaacattaaattctatctttccacgaaacaatgtaatttcgttcttttcggcatcggtttgtttgatatggaagcaagttccttttacttcaataaaagccttgtcgatatatacttggaaagtacttccttcatgcttataaacttcaaataatgaattaccactcaaccagacttttctttctttgttaaaagcttttgtatattgaatagaacttccgggctccatccatactttgctgctatccggaagagtgtacatctggttctgctgagctgtaattttaataagctcattagctatcttgtcgcctttaaacgttaaccagaatccgcctattgtcaataaaaatgcaattgaggcagcggcaaaataccaccttggttctacaagaactctgttatttttcctgtattcacatttggtttttacctttttccatatttgttcttttattgccatatcagcagctctgtttccagattcattccattgtttttttatttctatatttaccgattccaagtcagcaaaggctttccgttgctttttggagagtctacctgacagcagacttttgattaatcttttcctttcgaccttatccattctattctaccttgttggttttaaactctattgttgctcatatactataaatacacaccagctctttctaaccccacatcgactttgtaaaaaagtgaaagtttttttgaacgtaagctgtaattatctgataattagcaatgtagttaattgattaatgcgaaaaaaaataaaaaagatgtgagatgtattactaagttcttgtagaactaaggccatatttggctgccgcttcagtagctatcctattgttgataggtggactttggatgattttaggtgataataaagcggaaatgaatgagttggtaaggattgaagcccaacaaagtatgatgtatattttgccggatagcaccaaggtctggatgaagcccggaagttctattcaatttgcaaaagattttaataaagacagaaaagtctggttgagtggtaattcattatttgaagtttataagcacgagggaagtacttttcaagtacacattaataaagcttttatagaagtgaagggaacttgctttcttgtcaagcaagatgatataaagcagaatgaaattacgctgtttcatggtaagatagaatttaatgttgaatctaccgggaagaaaatagtcatgcaaccacttcagaaagtgacttataatgtagataatgcacaaacacaaatagagaatatctcaaatatcagttgggaaaatggaagatataactttgaagatgttccgttgactcaactgattgaaacagtcaatcagatgtataatacaaatatagtcttaaagaggaatttaggaaaaaaagcattgtttagtgggagtatccgttatgacgaaactttggatgatgtacttgataaaatctgttttagtctcaatttgaccatagaaacacacaatgaacaaattattattcattaatatcaatataaatattttattataaacttaatcgaatgtctaatctaatcagtcgaagcatgagaaaacaaagaatctctagttgcaggcgatatttgaagtatatcgtcctcactttgcttttttatccgttatctgtccttggagctcagggacaagtttcagtaaaagggcagtcaatcactattaaacaggctattcagcttattgaaaaaaacagtagttatacttttttctacaatgcagcagacctgaaaaacacaaaaactagaaatattaattgttcgggtacaattaatgaagtgcttaacgaagtattcaaagggagtggagtcagttatactattaaaggtaacgaagttattttaaaagttgaaggcgaatctactcaacaagcggccaaacacaagattattggtgtagtgaccgagtcggccaccggagatcccattcctggggcatctgttatgattaaaggaacaaaaaccggtacgactaccgatgtagatggtaagttcgaggttatggcgacttccagtgatgttctggttatctcttttatcggatattcttctaaggagatcaaagtaggaaaccagaaagtactgagtgttactttatctgacgatgcagaacagctggatgaagtagtcgtaacggccttcggaacaggacagaagaaagaaacagtaacaggttctatccagtctgtacgtccggcagatttgaaagtaccgactgctaatctttctacggcttttgccggtcgcctttccggtgtgatctcttatcaacgtagtggtgagcctggaaataacggtgcggatttctttatccgtggtgttgctaccatgaacagtgctactccgcttattgtacttgacggagttgaaatctcaaaagcggatttgaatgcacttgatccggaagtcattgaaagtttttctgtactgaaagatgcaactgcttccgccatgtacggtacacgcggtgcgaatggtgtacttatcattaaaaccaagtcgggttccgaccttgaaaaaccgattatcggtgtgcgtgtagaggcttacgtcaatacccccattaagcgcccgaaaacggtggacggagtgacgtttatgagaatgtataatgaagccgttactaatcaaggtaccggagatgcactgtattcagatgataaaatctatggtacggcgaataacttgaatccatacatttacccgaatgtggattggtacgacgaagtattcaagaacgcgaccttcaatcagaaagctaacttcaatgttcgcggaggtacttccaagattacttactttatgaatgtgaatgtcaatcatgaaacaggtatgctgaaagaccgttccagcaacttcttctcttataagaataatatcgactatatgaaatatgcatttcagaataatgtggacttccatatgtcgaagacttctactttgtctttacacttgaatgtacagttgaacaatatgcatggtccgttgacaacttcagaaggagccggtgtagataatatttttggggctatcatgggaactaacccggtcgattttcctgtaatgtatccgcaagaagatgagaaatggtatcgttggggtagtattgtggcaggtaactataatcctgtaaaccctgttgctgtgtccagtatgggatataaggatacgttcgagagtacggtcgttgccaatctggactttgatcagaaacttgattttattaccaaaggattgagcttcaaagcattgatttcatttaagaactggagttataattccaaatatcgtttacagggttataatacttaccagttgactgactataccaagaatgaagatggaacatataattatacagtaaattcaataggggatgcaaccaatcatacgttagattctttctttggtactgacggtgacagacgcttttacattcaaggttactttaattatgaccgtgcttttggcgatcatcatgtaggtggtatgttgttgtataaccaggatgaatataactcaaattttaattccagtttattgaactctttgcccaaacgtagaatgggtattgccgttcgtgctgcttatgattatgccaatcgctatttatttgagttcaatgctggttataatggatctgagaacttcgcaaaaggacatcgtttcggattcttcccctctgtgtcagtgggttggaatatcagtcaggagaaattctgggaaccaattagaaatatagtatctaatttcaaaattcgcggttcttatggtttggtgggtaacgaccaagtaccttatactcgtttcttgtatatgggaatcactacattgaatgattcgcccagctatcagactggttatggcagccataaagagtcacataatggccctacattctcaagatttgaaaatgaagatatgacatgggaggtaggtcataagctgaatgtgggagcagacattcaattatttaactctctcaatttgacagttgacgcattccgtgagatcagaagtaatatccttactacaaaaggttctattcctaattatctgggagcagccaacacagtaatctatggaaactttgccaaggtaaagaactggggagttgatctggcggttgattatggtaaacagatcaatagagatctatcaattcagtttaaaggaacgtttacgtttgccagaaatcgtgtaatggaaactgatgaggccgctgatatacgtccggctctgtccgcagtaggaaaacccttgaatacactatggggatatgtagctgacggactatatattgacgaagctgatatagcgaataatcctacctctacattaggtaatataacaatagcggcaggtgatgtgaaatatgtagaccaaccggatgtaaatggtaattatgacggacagatagactccgatgacagagtcgccattggtcatcctactattcctgaaattatctatggtttcggtccgtctattacttggaagaaatgggacttctccgtattctttcagggacaggctaacgtctcattgatgatgagtggttttgagccttttggtactcaaagtaaaaacaatgtgttggagtggattgcagaggattattggagcaaagaaaatcagaatccgaatgctaaatatccccgtttgactaagtacaacaacaataataatatgcaatcttctacttattggttgagaaacgccgctttcctgaaattaaagaatgcagaagttggttataactttaaatggggaagagtttatatgagtggaaccaatctgctgacattctctccgtttaaattgtgggatcctgaaatgggtggaggaaaaggcatggcttatcctactcagagaactttcaacttaggtgttcaaattacattcaaataaacatataataaccagtgattatgaaaaaaatatatagaattttattcttgctagttgcattaattggatatagttcttgtaactatctggacattgttccggatgaaacaactactgacgaggatacttatgctgataaagatgcagtgagagattatctttattcttgttatgcctatttgccgcagtgtaacatatcgagtggtagcttggaccagatgacaggtgatgaggtgattactgcattcgagcatgaaacgtttgccggtttccctaaaggaaactattctgcggcaactcctgtaatttcttattgggacactttcttccagggtatccgccaatgttatatgttgcttgaaaggattgacaaggtagctgatttgagaaacgatttgaaagtggattataaggcacagactaaatttctgatagcttattatcattatttgatggcccgttgttatggtcctactttgctgataaaagaaacaccttctatcacgactccggtggaagaatatttgggaagaacaccttatgatgaatgtgtggaatggatatgtaatttgtttgacgaagctgccaatgatttgccggctgttcgttctacggcttccgagttcggacttgccactagtatcgctgctaaatcattaaaggcaaagatgcgactttatgcagcttcgccgctattcaatggtaattcaaaattttatagcaactttgtagataaggatggtgtgcagttgatgccgcttacttatgacgctaataagtgggtacttgcaagagatgcctgtaaagaggctattgaacttgccgtactgaacggacatgatttatataaaaagaaagattaccggctggatgagtcagaagctaatccataccctgaagaaggagctgtcagatgtttgcgtacaggtatggtggattgggaatcacgtaacgtagaagttttgtttgccgaaactcggaatgaaggtagttatggcgtacaaaataaatcattgccgtttgtgaaagacggttgggcatggaatggtgtttgtcctacttgggctatgttgaatcgcttttatacaaagaatggtttgccttgggatgaagatccggaatttgcatcgaaagtgaaaaccgaagtggttagtgtagatgctgctcatgctactcaagctgcacagggtcagaaaacaattctctttaatttagaccgtgagcctcgttattatgcttggatagcttttcagggtggttactttgaggtattgaacaatgctacaaatccggcttacagcgatggttatgtagatggtggacgcttggtatgtagtttccttttgggaggtaattgtagtattggtacagctaacgtgcagcgtgatggtaactatagtcctggtggatatttgaataaaaaaggagtggatcccaatactaccgtggggacgagcagtacgactttgaaccaatatccttggccggttattagattagcagatttatatttggcttatgcagaagcttgcattgaaattggaacatcagatgatttgacgaatgctaagacatatatcaattatatcagagaacgtgcaggaattccgacattagaaacttcatggaatggaatagctacgctgaaccaatctaaacttcgggaaattgtccgtcaggaaagaatgattgaattgtatctggagaatcaaaatttctgggatatgcgtcgttggcttctggctgaggaatatttcggagtaaaagcgaaaggtatgaatattaaagcgtcaacaattgatgattttgccaaactgacagaaatcagttttgagcgtaagtttaaatctcctactcagtatttgttgccaattccttctactgatataaacagagacccacaattggtgaataatccggggtattaatcaataaaatgtctattaatatgaaaaaaatattatcttcctcaaatccgcaactacgcgcctaatatgatacagaagcgaaaagaatctgcatcgttagtaaaaagggggcacagtgcatcgaatgtcaccataaagacatataaatgccccttaccccaccatgcgacttgaggcaatacgcaaaatcacgactataagttgtcggtgttatccaaagtcattctggaacacattggcataagcattgttgcatgaatagatattcagcacatacttccttgatgtcctgacccatttggctggcacagagatgaacttaaagacaaacgtcttgatgcggcttgttgctttgagtccgaacctcttcacgtcaagcctcgccatgatgaatttatagaagttgcgtatgagtgccataagcagaagaaacaccgtgttttctcccataaaggattttggaagcctgttccagccgaatccgttattcatatcatcgaagatgcgttccttccctccacggaggttatagaattcgacaatctctttctcggaagactcgtagtcatttgtaaggatgcagcggtaggtgtattctccttcccacaggtcgagttcgccgtctatccgcttctgtctttgaatcacaagacggtatgccttccctttccatttctcgatgagaatggaggccagctcaaactcaatgccgcccaattccactttcttccaacctctgagggcaaagatgtcattgtagagcgaactgcatcggttagcacggatatagaaggtcttgcagtgtttagcaatctcttccactatctcttcagaacacgagccgcaatcagctctgaaacggttgataataagcttgttttgttcaaacctttcaaagaacctcttcagcgtgtccttctggtggaaacggacatttgtgttgccgtcgctgttctcaatgccgacaatcaagttgccaataaccgccacgccagggcgataaccaaggaacttcttgtatgtaggcttcgcatcaaacttctcagcctctatgaactggtggtcgaagtcaacgtcatacccctcgccctctttcagctgccctgtggacaataggcaattgaggagcagtgtattcagcttgtctgccgtgttgaagtcgtaggtcttgccagtgtcggatgtgtaggaaatgttatcctgggtcagttcctttatggctctaagaatcgtgtcggcactgcatgtgcgaagtgtcggatgaagcgaaaggtggtacatcagatgagtggtgacatcctcgatgcatgagccgccacaaaaataaacgctcataagcgaacggatgatttcgctgtattgataaccatacagcctgcatctcataccgagggttgagtcgattacagatgagagtctggagtcaaattgctccattattgaaaatattcctccaaaaggagtgagtttctcggatttaattgctacctttgccatgtctgtcgggtttgatacatattttgatttgcaacactaagataggtgaaaaatctgacatggcaaattcctgagcaactttttgttgctcaggtacttaaaaagttatatttgtaatagtgttgcggaattaaggattaattaaagcatgagaaaatcactcagttttcacagtagcgtgcgatatttcaagtatatcgtgctggttttgcttttttatccgttgacggtccttggagctcaggggcatatcacggtgaaagggcagtctattacaatcaaagaagctattatgctcattgaaaaaaacagtaattatgtcttcttttacaatgcggcggatttgaaaaacattcgattgaaaaatatcaattgttcgggtccgattgataaggtattgaacgaagtatttgctaatacgggaatcacttatctgattcaaggcaatgatgttgttctgaaagtgagtaaaacggaatcggcccaacaagctaagaaaacggaaattgtgggtgtcgtgacggatgcacgcacgggcgaggctgtcattggggcgagtgtcgctattgtaggtaccacaacgggagttatcactgacatcgacggtaagtttgtgattcaggcaggtccgcaggatgttctgaaaatttcgtatgtgggatacacagctaaggaagtgaaagtaggcaaccgtaaagtacttgctattgatttgtcggaagatgcacaggcgcttgaagaggttgtggtgacagcttacggaacaggacagaagaaggcgagtatggtaggctcggtgcaggctatccgtccggcggaattgaaagtcccttcaacgaatctttccaattcatttgccggacgtttatccggtgtggttgctgttcagcgtacaggtcgtcccggtgcagacgggtcggatttctggattcgaggaatctcaaccttgagtgaggctacgtctcctctgattatcatcgacggtgtacaggtatcttcggctgatttgaatgctttggatcccgaggttattgacggattctccattttgaaggatgctaccgctacggcaatgtacggaacccgtggtgcaaacggtgttatgattgttactacgaagtccggacaaaacctggataaaccgattataaatttccgcgtagagggacaaatcagccaaccgaccaagacgcctaagttcgtggacggagctacgtatatggaactgttcaacgaggctgtaaagaacgacggcagtccggacgttttgtatagtcaggacaagattaacggtacacgtatgaaactcaatccgtatgttttccccgatgtgaattggtatgatgagatgtttaacgatgtagctttcaatgagaaagttaactttaacatccgtggcggtggaaagaagattgattatttctcaagtatttcggtcaaccacgaatcgggtatgttgaagaaccgttctaaggactttttctcttataacaataatattgatgtgatgcgctatgccttccagaataatatcaacgcatatctcagcaagtcatcaaagttatccgtaagattgaacgtccaacttcgtgatttgcgtgagcctaaccgcggaattgatgatatttttgcagatgcaatgaattcaagcccggttgaagcacctgttttctatgaaccggacggaacaaccaatcacgtgaaatggggtactacggaccgtttgattacggcttatcagggtaacccggttgctcagttgactacgggatataatgatacgtttgaaagtacggttatcgccgctcttgaatttgaacagaaattggatttcctgactaaagggcttcgtttcaaagcgttgggtacgttcaaaaactggtcgaagtctattaataaatatagcgccggctggaataaatatctgttgggatcgtatgaacagaatgaagatggttcatatagctatactacaaacagagtcggtaatgaagtgtcgactgacttgaatagtactaacgagacggcaggagaccgccggatttatctggaagcaatggtagattataaccgcacgttcggaagacatgatgtaaatgccatgttgctttataatcaggatgaactcgtgaataatgtaccgggtaacaatcttatcaattctctgcctaaacgtaaacaaggtcttgcaggccgcctttcgtatgcatacgatggaaaatatatggcggaagtcaatatgggatataacggttcggagaatttcgcgaaaggacatcgctggggatttttcccttccatagcactgggatataatatcagtgaagaaagtttctttgaacctttgcgtaaagtcatcaccagcatgaagttgcgtggttcatggggattggtcggtaatgaccagatcggtggcgaaagatttatttatatgcctacaattaacttgtccggcaagggatttactaccggtatcgaccaaaactatggattgagcggacctgtttacacccgctatgaaaacaatagcatcacttgggaggtaggagaaaagatcaatctgggtattgacttgcaattattgaacagcctgaacattgttgttgacattttccgtgagacccgtagagatatattccagaaaaaaggaactattcctacatatttgggaaccggaaatactgatgtgttcggtaatcttgccgagatgaaaaaccagggactcgacctttcgattgattacaacaaggcgttcagcaaggatttctatatgaactttaaaggaacgtttacttatgcgcacaatgagattactaaatatgacgaagctcctaaatatgcttttcagtcaaaagtgggtcagagtgctaatgtgagccagggatatttgtcaaatggattgttcttggatgaggctgaaatagaccgttacaatcaacaaatgggatctacattgggagccggtgatattaaatatctcaatgtctcaaatatgcatggttatggagatgatatcgtggatgtggacgactggacgtggattggaaatccgactgttcctgaaatcgtatatggtttcggaccttcgttcaaatataagaactgggacttctctttcttcttccagggagtagcgaaaacttctttgtttatgagtggattccatcctttcggagacaattcactgcgtaatgtgttgcagtttgtggcaaacgacagatggtcaccgactaatcagaatgtggatgcaaaatatccgcgtttgacccgtaagacaagtttgaataatacgaatcccggtaactccggccgtacttccgattattggatgcgtgacggttcgttcttgaaactgaaaaatatggagctcgggtatacatttaagagaatgcgtttctatatcagcggttctaacctgttgacattctccaagtttgatttatgggatccggaacaaggcggtggtagtggtttgaaatacccgacacaacgcgtctttaatgttggtttccaaatgactttcaataattaaatttacatagtatgaaaaaaataataaaatatctgtttttagcattgtttgcaggatttacaatggtttcctgtgatttcttggatgtggtaccggcggagaaagcaagcgataaggatgccttctccagtcctaaagcagcagaaagattcctgtattcatgttatggatatataccgcagattaatatggtacagacctgtctggacttcagtggagatgaaataataagcccttttactcaagagtcttacgtaaagtttgctgaaggtgtgtatacctcgggaaacttaatcatcagttactggaacgatttgtttctgggtattcgccagtgttatctgttaaagaagaatattacgtctgtcccccgcatcgaccaggcaaccatagacagctatgtggctcaggctgatttcctgattgcttattttcacatgttgttgattaaatgctatggtcctgtcgttttggtgaaagaattgccggttttggatactcccaaagataatttattgggacgtacctcttatgatgagtgtgtacagtggacttgtgatatgtttgatgatgctgccggaaggttgcctgcaacccggaccggttcggaatatggacttgcaaccagtgtggctgcaaaagctcttaaagccagattattgctttatgcagcttctcctttgtttaatggtaatacagaatactatagtgacttcgttaatacggatggtagttcgttgatgcctctttcttatgatgaaaataagtggaaaaaggcggctgatgccgcacttgaggctattaatctggctgagtccaacggatatagtttatatgagatgagagaaggggacttgagcggttatcccgaacctcaagatctaacacagcgtacgttgcgttttacatttatggataaagacaattccaaagaagtattgtttgcagagacccgtaaagcaggtgcgtatggtttgcagcctaaatccttgccttatttaagtgacggttcgtggaatggagttgcaccgactttgactatggtggaacgtttttatacgaaaaacggactcccgattgacgaagatcctgagtttgattatcaaaatcggttctcggtagttccgttccccgatggtgctacttatggggaaggacaaactataaaactgaatgttgaccgtgaacctcgtttttatgcatggattgcatttcagaatggctattatgaatgccagacagaatctaaagagaacgcttatgtagcgaaagccgagcgggcagaaggaaagaaatggttgacagattttacagaacaaggtaattgtggtaagcaaggtagaaacaataactactcaaaaaccggatacctgaataaaaaaggtgttcatccgggagtagctgcttccaagtcgcaaaaagaaccttctaaagattacccatggccggttattcgtctggcggaattgtatttgagttatgcggaggcatgtatcgcttataataaagatgggtatcttgaaaaaggtatggtaaaactggatagaatacgtgaacgtgccggacttctttctgtcaaggattcttggaagaatgcaaaaaatccgattgtcagttatgagggaaatggtggcctgaacggtaaactgacagagattgtgagacaggaaagaatgatcgaactttatctggaacagcagaacttctgggacattcgtcgttggaaactgggagataaatactttaatgtaccggtgaagggtatgaatattgatgctactgatattaatgggtttgccactgtgaaaactcttcctgatgtacgcaattttgatactccgcggcagtatttgttacctattccggcagcagaagtgagcaagaatcctaatatggtacagaatcctaattattaattaaattttagcatgactattatgaagaaaaacatatttctattggctgtcactctacttttgataggattcgctagttgtagtgacgaagatacaaagcctattatcccttctgatgtgatcgacttgagtgctgacactcaaaacaagcccggttacattgtgcttcgttgggcaacacctgatgataatacgatcagatacataaaagtatcttattatgattatttgctggaacaggatgtggtaagattggccagtgtttatgcggatagtgtgttgattccggatacacgtaaaaagtttggagaatatgaatttaaagtccagtcttatagcgaaaccggtgatgcgggaaatgttcagacaatcaaggctgtttcggaaccggctccggtacaagtggtctttggtgagtccaaacaaatagcgttgacggtggaccagttgtcgacgaatgctcaggaaaaatcggaaggtcctatcgcaaaccttattgacggaaataccgcttcttacttccatacgagctggagtgggactgttcctccggctccccactggttccagatagatacgaagaaagagattacttatttcaagtatgagtcggtagcgcgtaacggcaataatattcctgatgatgtggatattatgggtagtaatgacggagtcaacttcgaactaattgagaatcttacaaaggctaagaatggcatgttgatgagtacatcgccctacacatcgcctgtcatgggaaataattcaaaaccttatcgttatatacgttattcggtgaatcatacgaatacaggttctgtcttttttagtatggcggaatttaaactgtttgaggttgatgcaagcgttgtcgatcctgaagctgattagtaaggagcgtagaatgcagacattgaaataattggggaaattttgtctttttgacaactaaggcggaaatatgaatatttctttttaagaataatattagatttccgccttttttatttggatgttttgaataatagatgttacataataatatatctgataaatggtaaattgtcatataaaaaaatacttgattatcttcttcgtacttgtacagggggctgtcgctttttcttgtgccagtgatgatgaagtactggaagtggtcgatttgtccgttaataaggaagtggtggatttcaaaagtgaagccggaacgcaaaatataacggtttcaacgaatgctccgacttgggaggctaaagcggataaaaactggtgtacgctttctgtggcaggaaagatcttgaaagtttccgtagacgaaagtgaagaaagattggtacgtgaagctaccattacgataacggcggaagggcagaagaagacggttaaagttcggcaactgggctatgaagctgctatcctgattgatacgaacgtgtttgaagtggaagtcattggtaaagagattacttttaatgtcacgaccaatgtggaagtgagtgccgggtttcctgattggattactgaaaaggcaaaatcccgcgcgccggaaatggtgacgtctacccacacttatatagtgaaaagtagtacgttggatgaaaagagagagggagccatagtctttactgaggttttaccggaaggtgcttcggaagaaaactccccggtttctgcttcggtcttggtttcacaacatggcctgaatgaatataatggaggtgcgggagaagacatcgaaggtgacatcaaagtgaaagtggtgagtgggcacgatacttctcatcagggagaagatgctattgaaaagtcttttgacggtgactatacaacgttgtatcattcgagctggtcgaatggcggagcgaattatttccctattacgctgacctataattttgcggaagcgtctgatgtggattatctgatttattatccccgttccacaggatataacggtcattttaaagaagtggaaatacagtattcggaagacgggagtgtatttacgaagttgctggataaggattttgagggttcggcaactgctaccagagtaacctttgataatacggtccgggctaagtctttccgttttgtcgtgaaaagcggagcaggagacgggcaagggtttgcttcttgtgccgaaatggagttctatgccaagaatctgaatgcatttgattattctactctttttgaagatgaaacgtgtagtaacttgaaagcgggaatcatggaagcggatattgagaactgcaagtatcctttctttaagaatctggcttattatatgttcaaggataagtatgacagaaacttccgtgtggaggactataaggcgttcccgaatccggatattcagtcggaaacccacaaaacaaacccgtacagccttcttgacaatccgacaggtatctcggtgaaagaaggggagacgctggttgtaatggtgggcgacacacatggacagaacatcggaatgaaagtacaaaacctggacgtaccgggaggtgacggtttcggaggagttacgtatccgttatatcgcggtattaataaactgacgatgacagggaaagggctcgtatatgtgatgtatcataccaaaacattggaggatgcggaaacagcgcagcctgttaagattcattttgcttcgggtacagtgaatggctattttgattcgcagaaagaagaacatcagggacgttggagcgaattgttggggaaagctacggacaaatattttgatgtggtaggcaagtatgcacacttgacatttgaaactaacgattttaggaaatatgtttccacaaacggtaatgaattgattgatctttatgataagattgctcacagtgaaatgcaacttctcggattggagaaatatgacaagatgttcaagaacaggatatatctgaatgtcatgtatcactcttttatgtacgctactgcatatcatacggcttacaatcagtcaaccatgggggatgtgtgtgatcctaatgtcttgaaaaccaccggttgctggggacctgctcacgaaatcgggcattgcaaccagacccgcccgggcgttaagtggataggactgacggaggtgaccaataatatcatgtccgagtatgtgcagactacaattttcgggcaaccctcccggatacaaaccgaggatatgggagcggtttaccgtaacagatattcaaaggcatggaatggtattattgttccgaaagcttctcatgctgattttaaaaatctcgatgattcggatgatgtgttttgcaagttggttcctttctggcaactggagctttacttcggtaaagtgcttgggcggactcctcttcagcagtcggaccgtggcggtttctatccggatgttttcgagtatgctcgtacaaaagattatggtggcatgagtgagggacagattcaaatggatttcgtttataattgttgtgtggcggcgcaggtgaatttacttgatttcttcgagaaatggggattcctgacacctgtggacaggtcgattgaagattatgatacgaaaactttgaaagttaccgaagaaatggttgatgaactgaaaaagaaagtagagaatctgggatatgacaaattgcagaatattgctttggaatatatttcggacaatacatgggaattgtataagaacaagcctgaagtaatatccggaacaaatgcaacacgaagcggtaataccattacaatcaagaattggcagaatgtagtggcttatgaggtgaaggatcagactggtaaacttgtctttgtttctagtggtgaaacaacctcttctactaccgatatgttcactctttccggcaactgggatagtagctataaactttatgctgtatcggcagcagggaaacgcacggagattccggtaggaaattaactgctgttctgaatattgccatagattagtacaaaactgttatagttatcagttatatctgataactataacagactgtgttaatctatggcatttttcatgtattttatagatgtaattcgcggtaaaaatattacttttgtctatcacaagattttatacaatatgaaggaagaagagttgatagaacaaatgaaaaatggcaataatatagcctttgctgcattgtatgattattattgtcagaaggtctacaattttaccaaactttatgtaacttcttctgatactgttgctgaaatcgtgcaggatgtttttgtgaaattctgggaagcacgccacttattggataacaacaagaaggtggagggctttttgtttgttattacccggaatatcatttttaataaagcacgcagcaggatgcgcgaagatatgttcaaaatgacgatactacgttccatagagaacgaagaaccgtataatcaggaagaccaaatggtggctgaggatttaaaagaatatatcgatcggttaattgccgtgttacctaaaaggcaacgtgagatattcttgatgagcagggaggagaacatgacttatcgggagattgccgctcgatgcggtatcggtgaaaaagccgtagaacggcatattcaccttaccttgaaattcttgaaaaagaatcttcttttattcatcttgttttccatgctccccgagtgaaatccggtatctctaccggtatgcttccattcaataccgacttctcgcttaattctgtgatgcaggaccattcggcggcatcgtatacatccatgtcaagaggaagaccgttgcgtagacagtatatcagtcggtaatccatcacgtagttcatttcgtttggcaaacctctacgatgtgcttcttcgccgatagtggcgctgaaaggatgtttatagcgggataatacttcttccagtgcttttccttcaagaggagtgtctccgttgggctccagtgcgatgcaaggcacggggtatttttgtgcaaaaccaagagtaccgcatacggtttgcaggcggctgtaaggccggggcgtgcatacatcatattgcagcatgattgtttttcccttcgcggtatggatcagggtcgtgttgacatctcccaatttatattcctgtctggcttccggtgagtctttgccgaactttttccgggcgtattcgctcatgcctgcttggtgggtggacattgaaacgaggtattccattttatcgccccggtgaatgtcaagtatctggcaggcaggtcccagaccatgagtgggatagggattacccgtatgttcgatgctatatcttttcccccagtggttgtggtaacctccttcgctttcttcggcaaaatacatggaacgcaggtcgtgtatataagctccctccacgtgcatgatagttccgagtattccttggcgggccatattgagagttgttagtgcaaatggatcgtagcaacagttttccagcatgatacagtgtcgtcttgtcttttcggcggtatcaaccagttgccagcattcttccacactcatggctgccgggacctcaatggctacgtgtttgttgcattccatggcaaaggttgccatagctgtatgcattagccagtcggtgcagataaaaacaatatccagttcatcatgctcgcacatctttttccagccttccggtccggtgtatccggtggctccgggacgattgttttcctttagtagttgttgggctttggccaggtttccttctctgatttcacaaagagcgttgatttctattccttcaatttgcagataacgttgcagggtgagcaatccgcgattgcccaatcctatgattccgatacggacaacaggaataggagggtgcgatagttgaagcacgtgtgattgtgtcggagaatctttcataatcttaaaggtctaaagtaatagaaaaaaagagaatctaatttctcagattctctttagagagcggaagacggggctcaaacccgcgaccctcagcttggaaggctaatgctctatcaactgagctacttccgcaatttttgtgggcaaagatggattcgaaccaccgaagtcgaaagacagcagatttacagtctgccccatttggccactctggtatttgccccttttgcttttgaggaggtttgtttctcaattgcggtgcaaagatacaactatttatttaaactccaaacaaaatcaatcatttttattgcagtaattgcacattcgtctcctttgttacctagtttgccaccggcgcgatcctctgcttgctccattgtatttgtagtaattaatccgtaaataactggtatatcgccagttgcgtttaattcggtaattccttgagtggctcccatgcaaacataatcaaaatgtggagtatctcctttaattacgcaaccaattgcaataattgcatcaacatcgcaattttccatcatttggttggcgccgaaagttagttcgaaacttcccggtacggtttttacgagaatattttcatcttttgctccatgtttttttaatgtatcaactgcgcctttcagtaaagcacccgtaatgttgaagttccattcggatacaacgattccgaatttcatgccttcggcgtttggaactgaattgaaatcgtattcggatagattatggtaagctgttgccatagtaaattataaattgagaattaaaaattgaaaatcaagaatccggagaggtcaagaaaaaaggcacggattacatggatttcacggttctgaaataatccgcaatccggtgtaatccgtgcctcaatctcttatatatatataagatctattatttcttcatcaacttagcctgttcgatgtatttgtcgatgtccatggcttggtaagattggaagtatttatccttaatcttagtgtaagcgtcaacagcgtcatcatacttgccttgtttcaccagaatctctccggcttgcatcaggaagatcggactcagtgtattgttgtcggctttgtcagcagcagacatcaatgtagaggctgctttgtccaattgaccgagttgtgcgtagcagtttcctgcagcacccaaaattgccggagcaaccatttgatcttttccgttaaagctatccagcattttaacagcttcttcatatttgccaagttgtgcgtagcaaatacctgcataagctttggccaagttagcggctttagttccgctgaaatcgtctgctactttcaggaaaccgacaaaaccgatgctgtcaccgttcagtgcttgttcgtaagcatcctgttcaaagtattcctgtcctttgaaaagagccgcttgcgctttttcttcacgaggttcagcatagaggttcttgtacatgataaaacctgctacaatgataatcacagcaacaacaccgccgatgattgcgtttttgtacttgataagaaatgcttccgattgtgtcagtgcatcttctacgttcagatgttcgttctgattcttttgttctgccatttttatatgattctttttgttattattcgctatttgatatttcgactcgcaaaagtagtttttttatatctacaaacgaaatttagaggcatctttttttgttttacacccgaaaaccacgaaaatcttgctacttttgtgaacaaattaaggtgtacacaatgatactgaaacggatatccatattaaattataagaatctggaagaggtggagattgatttttccgccaaactgaattgttttttcggccagaacggcatggggaaaacgaacctgttggatgcggtgtatttcttgtctttctgcaaaagttccggcaatccgattgattctcagaatattcgtcatgaacaggacttctttgtcattcagggcttttatgaagcagaggacggaactcccgaggagatttattgcgggatgaagcgccgttcgaaaaagcagttcaagcgaaataagaaagagtacggtcgtttttcggaccatatcggtttcttgcctttggtcatggtttcgcccgccgattccgaactgattgcaggggggagtgaggaacgccgccgttttatggatgtggtgatttctcagtatgataaagaatatctggatgcgctgatacgatataataaagcgttggcacaacgtaatacgttgttgaaaagtgagtttccggtcgaggaggagttgtttttggtttgggaggagatgatggcgcaggctggggaagtggtgttccggaagcgggaagcgtttatcaaagagttcattcctattttccagtcgttctattcctttatttctcaggataaggagtcggtgggattgtcttatgaatctcatgcgagggatacttctttgctggatgtgctgaagcagagccgggagcgggataagattatgggattttctttgcgcggtattcataaggatgaactgaatatgctgctgggtgagtttcctattaaaaaggagggttcgcaggggcagaataaaacatatctggttgcgttaaagttggcacagttcgattttctgaaacgtacgggtagaacggttcctttattgttgttagacgatatttttgataaactggatgcctcgcgcgtggaacagattgtcaaactggtggcgggagacagtttcggacaaatatttattacggatacgaaccgagagcatctggaccgcatcttgcataaggtgggcagtgattacaagattttccgtgtggaacagggagttgtccgtgaaatggaggcagaacaatgaaacgtaatgatgcggaaccaataggtaaattaatacagcagtttcttcgacaggagagtctggaatctccattgaacgaacaaagattactggatgcatggccgcagatattggggccggctgccaattataccagcaatctttatattcgtaaccagaccttatatgtgcatcttacttctgccgctcttcgtcaggagttgatgatggggcgtgagaagttggtgcgtgccttgaaccagaaagtcggtgctactgtaataactaatatcatttttcgctgaggaaggggattctgtctattacctttattcccagtgcccggagtctttcgtttgcacggtcgtaataaaacggggtttccagatattgattattgtgggcatctactccgatgatagcggtacatccttcggctgctgctatcttccaaaaatccggatggggaatggtcgtaatcttgtgcgtgtcgttataatcttcgtagccgatgttgtattccaatgggaggtttaaccgtgcggcagtccggcaaatatgtctgctgattaatttgcagtgacggtcgaattccggataagaacgcataaataagtccggatgagcaaagtaggcaaacagtccgctttccattccttcaatggcgctctcctcatagagttcgagcatatctaccgttttggtatttctaccgaaataaggaaacttctcgtctgtatggaagtgatggtttccgaagatgatgtaatccagtttaaattctcgaatgacttctttcagccaatgaaggtagtcgggaaagtattcgcattccaatcctattttcaggctgatccggtctttatacttttcttgtaacgagcggaggctttctacgtaatccggcagttcctctggagtcatgcggatatctgaaatgtagttagtatgatatttccagggagtatggtctgaaaaacccagttcctgatagccgcctttaatggcgcttaaaacaaattcttcgtcactccctgtcgcatgaaggcagcgggtggtatgggtgtgataattcgttctcatttgtcgttataattatgtccatgcggatatcgaatgattctgccgggacttcttctactaattgaaaaggaaagcagataccagctttgcaggctgaggggatacgtggcaaaaggcggtcataatagccttttccgcgtccgaggcgattacctttccggtcgaaagctactcccgggacggcgataaagtctatggctgcatagtcggtaaacacctctccggtcggctcttctattccgtagctaccggttgtcatgtcgtccgggccggtgtatatacgcagttccagatcatcgcctacgacaaccggaagcaatattcgtttttcactgctccattttttgataaatgtatgtgtatccacttcgtctccgagagagtggtagagcaatatggtatttgccgccctgaaagccgggtgggcttcgagggcggcaagtattttagctgattgaagcttccgcatagtcgaagtacagagttgggtcttcaacgatgcgatatgcttgcgcagttctttttttcttttcattctttttgtccttagtatcttcttcttccactgctaccggagctttcgggaatgcttctcctttctcgagtatctcgatacccttattgacagtagcgtctgtcttgttaaaatattggaggtaggcttccagccccaacatattgtagatgatgttgccatagatatttttctccaataacttgtaggacttttggatgaggatatttcttcttttcaatcccttactttcagcaaagcggacaaactgctctaccagaccctggtggcggagataatttagtagttcttcttccgtttcatactggctgagttttttccggttgttgtcggtgtattggaatgtgaactgaatggttaatccacgattgatagccgtagaaagatatgaggtgacacctgtggtatcctgcggcacgaatatatccggcataatgccaccgccaccatacacaggacgtccgaggctggtgtaataaagttcgttttcattttgcttgatactgtcgcgtgagaagaattcaccgtgttcgtaacggttgaataaatccagttcgtaattacggtcttttccgctttcgtaggggcgttggatacaacgtcctgcgggggtataataacgggcgatagtcaggcggatagctgaaccgtcgctgaagtcgataggctgttgcacgagacccttaccgaaggaacggcgtcctactaccgtaccacggtcgttgtcctgaatagctccggtaaagatttcgctggcagaagccgaaccttcatcgatcaatacgacaagcggcatcttttgacagcttcctgtaccgttggcaaattcttctgcgcgaggatatttgcgtccctgagtatatacaatcagttttccttccggcaggaattcgttaaccatgcggatagctgcttccatgtatccgcctgtattgccgcgaaggtcgataatcaggcctttacatttcttgtggttcagttgcgctaaagcattgagaagttccacatggctggtacgtccgaacttacttactttgacataaccgatttcgtcatttaacatataagcagcgtcgacagtgttttgaggaatgtctccgcgtgtgattgtaaaacttaataagtctttttctcccatgcgtttcacccctaacttcacttgagaacctttcggtccctttagtgtacgcatagcccgttcgttggttacttttttaccgacaaacaagctgtcgtctacggtgacgatgcggtcacctgccattagtcctactttctcggaaggaccgccctgaatgacggcattgacgtgtattgtatcgttctgtatcgtaaactggataccgattccgctaaaactgccttccaactccgaatttacttcttcgaggttctgggcggggatatatgttgaatgcggatctagttcggccagaatctgaggcatggctttttccacaagatcggtcatgtttacggtgtctacgtattggtcgtctacgattcgcagcaatgcattcagcttgttagaggaatcgttgatgatacccaaacgattgccggcaaaatgcttggcataaaatgtgccgataagaatcccgattaccacgctgatagctatgatgacaggtgtaaaacgtgaagagttttttgtactcatgtctattcctttttttaaaagttcgtcttattatttatttggagcggtttcatccagttctgtatagatgacttcaactcctgcccgttttagtagttctattccatcttcgaggcggtaatgttcggagtaaacgactcgtttgattcccgcctgtatgattaattttgcacattcaatgcaaggggaagctgtgacatacatggtagcaccgtcgctgctgttgtttgaacgggctattttggtaatggcatttgcttctgcgtgcaatacatacggttttgtcagattattctcatcttcgcatacattttcgaaaccggaaggggttccgttgtatccatcggaaataatcatcttgtccttaacgattaaggcgcctactttacgacgttggcaataggagttctctgcccatatgctcgccatacgtatgtaacgtttgtcaagttctgattgtttcttttcagtgtccatgtttcttaactaattaccactaactacacggaaaaccatacggaatgtctgagtgttagattgaggtttatataaaaggtataagttgttctcatctccttcgtaagatgttgcgttgttcaggccttcaagaaagttcttggcgagtgcatctccaccattgtttccttctacagttgcttcgaatttattattcttaccattggcactccatgtaccttcaaagttaccggtggtagtaattactgttccctttatatttccttttatgatatcgccttcaaccgtaccctcaaatatgacgttgtatgtaccattcttgttaagttcgtcataaatctttgttttttgagcttcattctcccaaaaaggaaacatatcatgtccgccatccacagtgatgtaatttagtttccaggttttcccggtaaagatagcagccacatcatccgaatcattacatccggtgaatagagggagcaatagcaacaacccaagtattttacttatatttctcatcatcaatctctttaatacttattattaattttttatcccgtttctgattaataaagcgtcaatggtcggttcttgtccacggaagcgtttgtaaagtaccattggatgttctgtccctcctttcgacaaaatattattgcggaatgattcggcgacgtcctgattgaatatccctttttgtttgaaaagcgagaaagcgtctgcatccagtacctctgcccatttataactataatatccggctgaatatccgcctgcaaagatatgagaaaactgtgtactcatacaggtttctttcactaccggcaatatttgtgcctttttccatgcctcttgttcgtagaccttcacgtctccttcgaaaggtacgttacgtgtgtaccacgccatatcaagtaagccgaaactgatttggcggaggcaggcgtaggctacattgaagtttgaagcatccacaagacgttgaattaattcatccggcagtacttctccggtctgataatgacgggcaaaggtgttgagaaaatctttctctatggcgaagttttccataatctgtgaaggaagttccacaaagtcccaatatacattagtcccgcttaaactcttatatgtagagttagcaaacataccatgcaggctgtgaccgaattcatgcaagaatgtctctacttcattgaaagtcaacaaagccggcttgttctcggtcggcttggtgaaattcatgacgacggatatatgtggacggctgttttcaccagtctttttatctatccattgttctttgtaacttgtcatccaggcaccggcacgtttcccaagacggggatggaagtccgtatataagatagctaaaaactgcccatccttatcaaacacttcgtaggcctctacttctttgtgataaaccggaatttctgtattcttccggaaagtaattccgtatagtttctctgccaatccgaatacccctttttttacttgttcgagctcaaagtaggggcgaagcatttcttcgttaatattgaatttcttatctttcagtttgtttgagtaatagctccagtcccatggcattaaaatgaagtcatttccttgttccagacgtgctagttcctgtacatccttatattccgcttcggctgtgggagtgtaagcttccaataactgattgagaagtttgtatacagctctgctgttttcagccattctcctctttaatgtatattccgcatagtccttgtatcctagcagttgagctatcttcatgcgtgtattggctatcttctttacgatatcgatattgttgaattcgttatcgtgggtacacttggtattgtaagccatatacagtctatgacgtaaatcgcggttgtcagcataagtcataaagggaacataacttggggcgtgcagggtgaaggcccagccttctttcccttcgcttttggctgtttcggcagcagcttctacgataatctccggtagtccggcaaggctttctttttttgtcagcagcatttgatagctgttagtctctttcaggttgttttcgctgaagtcaagtgtcaacttactcaattcggtggtcagcttgcggtattcttctctcgcttccccttccagattggcaccgtgtcgtacaaagctgttgtatgcgttttcaagcaattgactttgttcctgtgtcagttgtaaagtctctttttgatcgtacacttctttcacgcgggcgaatagcttttcattcagcgtgatattattgctgtgctcactgagcaacggcataatcttttgagccagttcttgcaggtcgtcgttcgtttcggcactaagcatattgccgaagactgaaaccactctatccagtagttcacccgattcttcgaatgcttcgattgtattattgaagttcgctttttccggatttagtatgatagcatctatttccgcattctgttgcttgataccttcgaggatcgcaggctcgtaatgctctgttttaatccggtcaaagggcacggttgcgtgcggtgtctggtattgcccgaagaaaggattttgggcatttgttatattgttcatagtgcaaacaagtatcaatgttattaataatctctccatagaactacaaaactactaaaattgtagcttattcaacggataacagcttgctttttaacaatatataaaatgaaatgtataaaaaaaccgctacggtttcccgcagcggttttctatattattcaggcttctaattaagcgttaactgatgccatgtgagcgatcaagtcaagaactttgttagagtagccgatttcgttgtcataccaagatacaactttaacgaatgtatcagtcaaagcaataccagcttttgcatcgaagatagaagtacgagtgtcacccaagaagtcagaagaaacaactgcatcttcagtgtaacccaggatacctttcaattcgccttcagaagcttctttcattgcagcgcagatttcagcgtaagtagccggtttagccaagttaactgtcaagtcaactacagatacgtccaaagtcggaacacgcatagacataccagtcaatttgccgttcaaagcagggataactttacctacagccttagcagcaccagtagaagaagggataatgttgccggaagcagcacgaccacctctccagtctttcatagaaggaccgtcaactgttttctgagtcgcagttgtagagtgaacagtagtcatcaaaccgtcaaggataccgaacttgtcattcaatactttagcgataggagccagacagttagtagtacaagaagcgttagatacaaactgagtacctttaacatatgttttttcgtttacaccacaaacgaacatcggagtatcatctttagaaggagctgacattacaacatattttgcaccagcttcgatatgagcctgagctttgtctttgctcaagaacaaacctgtagattcaacaacgtattcagcacctacagcatcccatttcaaatcagccgggtttctttcagcagtgatacggatagattgaccgttaacgatcaatttgctgttttcaacatctgcttcgatagtaccgtcgaattgaccgtgcatagtgtcatacttcaacatataagccaagtagtcaaccgggcaaaggtcgttgatacctacgatttgaatatcgtttcttttcattgcagcgcggaaaacgaaacgtccgatacgtccgaatccattaatacctactttaatcattttgtttaaacttttaagggttttataatatttgttcaaatatctctcggtctccgcatttgttttattttcaaatgcggtgcaaaattacgaaaatgtttttatattcgcatattaaattcacattaaatattgaaaaaagatgggaaagaacacatttttacaggactttaaggcgtttgccatgaaaggaaacgtcatagacatggctgtcggtgtagttattggtggtgcgtttggaaaaatcgtatcatcattggttgctaatgtaattatgcctccgattggtttactggttggtggtgtgaactttacggatttgaaatgggtaatgaaagcggctgaaatcggagctgatggtaaagagattgctcctgccgtttctttggattacgggcagtttctgcaagcgacttttgactttctgattatagccttctccatattcttatttatacgtctgattacgaaattgactacaaagaaaaatgaggaagctccggcagcgcctcccgctcctcctgcacctaccaaagaagaagtgttgttgacggagattcgtgatttactgaaagagaagaattaataacggctgggtcctataaacattatttctttattgggccggttatacttctaactagttgtcttgccacattcgggtagtttcagctatcagtatttgtctgatgaggaaacccggatgtggcaaatttgatttatagtccgatcggttctacctgatatcctttttcaagtaaaagcgcgattaatccgtctttgcccggaaggtggcggacgcctacggcgatgaaggtgggctgggctttcatcagttcgggtatcttgttcatccaattcagatttctgcgctttaacaaatcctcccgtattcgtttccctatctctgttaatttcggtgaggttcggaagatcgaatctactttcacttcaaaatctatcaggcttttcatgttttgagtacgatacacatctgaaagggtattgacgaaagataaaggtgaaatttcgtcatcttcccgtagatctgatattaattcgtcagcttctttctttagattacttttttctgatacaaaggcgtcgaatatgccctccaagccgacaattgtgaggcctttctcttttgcttttttttctaaagctatgtccataacttgagatttcatactatcaatccgactttgggagtatcctgtgtctaccaatttcttacctttttctatctctcctaaaataagggctaagaaattaggctttatatacaccttatttaaaggagattttaaactttgacgtactatggaatcgagaaaatgaaaatcttctttatttaataagtcggcataggttgtgtctttaggtagttttatagcggctccgacctgagcaggggttggtttggacgttgtttcgctttctccggcgaattggctacaagcgttaaaggcttggtggagttcgggaatactgtcggtatattgatatagtatgtcgtatgtaccatgatatgttccgaacagataagagggatgcgaaagaccgttgcctgaaattttccataaccaaccgccttccggtcgctgtttcgcagtggaagtacaggtgataaaggttgcaatggtaagaaatgccaggaatagttgattgaatttttgcatagctattatgattataatatttataaatcttattatagtacgtctccgcctttgggtgtgggacaaatttgtggaatgtttagtaacggacaatgaatgcattgttctgcatttttacatgttccgcttagttttattttattctggatacgctgtctgcgtttttttacggcatcgtaatttttacctagtaggttggcaatctcttttagagatactttctcgaatatcaggatacagataaaaatctcgtaagacgacaactggattgattccagaaaacttatcaatggctggtttatttttcgatagaatcctaggatttcggtgtattcatcgtatgaaggttcagcaggtttttgattttccaatgtttgcatccgctcgcgtagggaagcgataatggcttcttgtgtctgattgcggaaagtaacatcctgattgacttgttctatttcctggaaaagtgatctccagtatgtacttgcttgtttttgcctcttgaacataataatagctaccggaattaagaggataactaatagtaccaatcccagaataatgagttgttgcagttgtagttgctgcagcaagatgtcgtgttcaatcaatgattgcgaaggattagattgcgtaatctcggttatcatgatgtctaaaagtttggtataagaaatatgtaaaaagaataaatacaatagtggctgccagattgactatccatagatctcctgtcattgctgagtttacctgttggggaaggggatgataataattagtcatgacatatgccacgcttgagacttgtaaaagaatatgtgttatcaggcaagtccataggctccggctatatacatacaaccagccgaaccatagtccgtatattaatcctagtacaggtaataaggtcatgcacccccacactacagaataaattattgcggctattataattgattttcggatgccatattctgtcagtagtcctcttagaatgattcctctaaaaatgacttctattataaaaggcatgagtattgcgctgataaaaggataaatgtaagcctcgtttgagtcttttgttccaatttctgtgaatatctttttgagaaactccgggaatggtacgattgaataaatcagtgcatgtacccacggaaggcagagagttcctcctgctgcaagtaatagtacctttatatttggtttgtcaaaacggagtatggagcggtccattgctttggttcggaaagctattgccagtattgttactgtgcttacatatagtatagtcgcacatagatagctaggtacgcctgatatgatgcagataacttgaacgattacagtccacagaataaagaagacagctagccaaatagattgacggcaattgggaaaagtgagtatttccatagtttttaatttaatgtaattatatagaagactaaaaacagtgttgcaaagtagtttcttttttgtgataataccaaattggtggaaaagtctaaagggacaggcatatatacattaaaaagcgttgtatgagctgtacataatggcttaaatggtatttgcgggacaaagattaactcattttaactcagtgttcccttgtcttgagagcgatagcagaaaataaaaaatggtttcatgatgttttgaatatactaaaatgatagatttttgacttatatcttatatagattgcgtactttttcctacttttgcagaccatttatttaaaaacccatacattgatatgcaggaaaaaataataattcttgatttcggttcgcaaactacgcaacttattggacgtcgtgtacgcgagttggacacgtattgcgaaattgttccttataacaaatttcctaaagaagatacaacaatcaaaggagttatcctttccggaagccctttttcggtttatgataaagatgctttcaaagtagatttgagtgagattcgtggtaaatatcctatattgggaatttgctatggcgcacagtttatgtcgtatactaacggtgggaaagtagagccggccggtacgcgtgaatatgggcgtgcgcatctgacttctttctgtaaggataatgtgttgttcaaaggagtacgcgaaaatacacaggtgtggatgagccatggcgatacgattactgctatccctgctaactttaaaaagattgcttcaacggacaaagttgatattgctgcctatcagattgaaggtgaaaatgtatggggcgttcagtttcatccggaagtatttcatagcgaagatggaacacagatcttgaagaatttcgtagtcggggtttgtgggtgcaagcaggattggtcaccggcttcttttatcgaaagcacagttgctgaattgaaagcacagttgggtgatgataaagtagtgctcggtttgagtggtggtgtggattcttctgtagctgccgtgttgctgaacagggctattggcaagaatttgacttgtatcttcgtagatcatggtatgttgcgtaagaatgagttcaagaatgtgatgaacgattacgaatgccttggcctgaacgtgattggtgtggatgccagtgagcagttctttgcggaattggccggtgtaacggaaccggaaggtaaacgtaagattatcggtaagggctttattgatgtgttcgatgtagaagctcacaaaataaaagatgtaaaatggttggcgcagggtactatttatccggattgcatagaatcattgtctatcacaggtacagtgattaagagtcaccataatgtagggggccttccggagaaaatgaatctaaagttgtgcgagccgcttcgtttgttgtttaaggatgaagttcgtcgtgtaggccgtgagttgggtatgccggaacatctgattacccgtcatccgttcccgggaccggggttggcagtacgtattctgggagatattacgccggagaaggtacgtatcttgcaggatgcggatgatatctttattcagggattgcgtgattggggattgtatgatcaagtatggcaggcaggtgttatcctgttgccggtacagtctgtcggtgtaatgggagatgagcgtacttacgaaagagcagttgccttgcgtgccgtgacatctacggatgctatgactgccgattgggcgcatttgccttacgagttcttaggtaaagtttcgaatgacattattaataaggtaaaaggtgtgaaccgtgtaacctatgatattagttccaaaccgcctgcaacaatcgaatgggaataaaataagtcctttttagatgatacttgagtagcctcaacttgaataaagttggggctattttattttcatctcggcaaacaaactgtttcatacggcaaaaccaatagtttcatgcattggaacctttggtttcgctgtacagaaaccatagtttcaccggtgggaaactttagtttcagacgcttgaaacttttgttcccaaggcttgaaacttccagtttcattacgggaaacaaatagttttaaacctttgaaacaaaattgaatagggtgcgtctctgtcttgtcaatgagagacacaccctattccgtataacttatgttgataactgtttatttcgcttgtaacttggtgacaatcgttgccgtaaccgtcggatcgtcagaactaccggcattaccagtcaggttttgaatatataccactcctttttgtccatcttgcgtctggtatgcatatacttttccattctctatttcaatactttctgttgttggtgacaaattctttagaggagtgtcatcaattctgctgattgcgttgaactgttctaaggtcatattcgtaactccgaatttagtattgcgagcaccgttaaaggttaagctatgcttggcaggagagattaatactgcttttccattcttattttccatacctatattaacttcagcagcatatttacccgcttcacggctcttatagatgcggccatataaccattcagcatagaatactccccaatatttgtcaactgattccaatttcttatcactatgttcagaaaagataacagcaggagtgatttctactacaaagtttttctgaaagtcttctccttcagcatcagttacactaattttgatcgctttgttttctgacaggtttgttatagtatatgaaaaatcataattacttttaggttcgtcaaatgtttgtctggtactctcgatgacagatatcgccgcaccggtttcagcattggctgtgctgataacgaaggaggtaagtcctgctgtagaagtgatgcttccttttaccgtatattctttgatacctttcggagtagttaccaagttcgttcctccttcaaaattgaatagtacagtaggaacataatcaatattagcttcattttcacaagaggtaagtgaaaacaggaagataaataacgtataaaataaatgttttgctttcatattattgtaaaattattggtttataaatctgattaccacccggcgttttgttcaatattctgactgttgtcaacttcttgctgcgggattgggaaatggtaacatttggaaagaaaaatacgttcttccagcaggcttctggtatatgtaggattttctaggctgcctgttacagtaaccttgtatactggtttagagaaccattcttccgctttggcccatcggcgggcatcgaagaaacgattgtcttcgaatgcaaattctacacgatattctttgtagatgcgctgtctgagttcgtccttattccaatttttgttttcatctaattctcctacaccggcacgtttacgtatcaggttgactgtttttactgcatttttgctgtcacccaattcattaagtgtctctgcatacccaagtaatatttccgcataacgtatcatttgggggttacagtcataattggagtttcccgaacttttgtgtccgattctatcgtcgagatatttcaggacgagataaccggatgatttgcttttatcatctacgtcagtcatatccaacgcttgttgggaaccattaagatcgaatgtgttgccatgataaaagattgtcattttaaggcgtggatcccggttttcataaggattcttatcgtcatatcctgaatttttattaatgataggctggccattggcatcgtatccggtgattggttcagtaccgtctttcatgtcgtaagcatctaccagattctgagtgggagtacatcccacataagatttttcattccagggagctccttggggaagattactatgcatggtggcattggcagcgagtagatatgtatatatattttctttggttttacgctcgcagaaataatgtgcataacttaattccggattttgcgtgtcataatataaatcatagatattcaatcccatgactgctgataatgcgtctctggcatcttcccatttcttacgatccatagacgggttgtttagtttgctggcagcataaagtttggtacgggctatgtaggccagtgccgctcctttggtagcacgcccgtaattgggggcgtcccattctaatggaagttgtgatgcaacatctgccagttcggaaacgatatagtcgacggttgcttctgcagttgaacgcgaacggtccaagtcggtaggagagatgatttcatctcccagcaacacgactcctccgtaccaacggtataattctgcataatacagtgcccgtaagaaacgcgcttgtaattttgaggaggctttttcttcatcagacagtaccgatttgtctactttttgtataaatagagttgcgttacggatactattgtaatagaaggtccagggatgtcctccgttcattgcaatatcagaggcagacatggttgacttaccatgcgtatgtgctgatgaatattcaataggtgcatatgcgttgtctgttgcacagtcaaggaaagttactccatctccggagaaactggagaagctaccttgtgttagacgcgtgcgggcatataggttatttaaaatctgccttgtctttgctgcgtctgcatagattaattcttccgtgttcgttcctgtctggattcgttccatatcaccggtacatccgtataggagcagtagggaaaaggctgttagaataatatttttcttcatatatcgaattgttatcagaggttagaatgtaacgtttactccaagattatagattctttgctgagggtagaagtttccgcgattggcaggttgtgcttccgggtcgatcacttttaacttatcccaagtaagcaggttgaatccgttgacatacatccttaatgcggatatcggggtgtgggtaaaccactttttagggaagttgtaggataactctacattcttcagtcgcagataagaagcgtcatacaaatacattgaagatgatttgaagttgttctgattggagcctgaagaattgctcatacgatgataagtcgcagtttgctgtgtttcaggagtccatctggccaaatgtctgtcggcaagagcagaaccaagattgaagaactcccatgcaacttcacctgtcagtggaattgttacacgtgttgctccctggaacataacggtcaggtcgaagtttttgtaagacagaccaacttggaatgagccggttatttcgggtacatccgagaaaccgaaaggtgctatgtcgtaatcattgataacaccgtctccgttgatatcacggaaacggacgtctccaggttgtaaggttccgtattgcgtcgggccggctgcgatttcggcatatgtattgtagaatccgtcggctatcagtgagaactgttgtccgatagaacctccggtacggttcatataaggatatttacgtatctgttcattttgttcgataatctcattgtggttgtaggcaatgtttgctttgatgcgatagccgaagtctttgatcttatgatcccaccctacttctacttctacaccttgattttttacttccattagattttgtggagaaaaacttgtcactccggaaatgatgttggtgcgtgagggagttttcaagatgttggtacggttttcgcggaagtattcggcattcaaggttaatttaccttcaaaccagcgtgtgtccataccgatattgaatttggtagaacgttcccaacttacaatctgtgctgcttttccttccaagagtcctccactggctgcagttggagattcaccgaaattgtaattggtgcctgcggcataggtcgcttccgaataataggcaaaattacttccgaatttgtcattaccgacttgtcctaatgaagctcttattttccagtaaggtaatagtttgctgtcttttaggaaagattcgttagtaacaatccagcctacggatgcggaagggaataatgcatatcgttcgccttcaacaaatctgttggaaccattgtatcctaaattgatttctactaagtatttaccttcaaaatcatagttggcacgggctaccagtccttgatatacctgcggtagccctccatattcaccatcgcccggtgcttggtaagagttatagttgtataaaataagtcccgaaacattatgtttttctgcaaattgacgtgaataattcacgaatgcttcccagtatacacgtttttttgctccggatgcaaaattgatgagagaagggaatactttggcaagtaggcgttggtatgttccattctcattatatttccatacaggttccaccacattcaagcccataccgttgtcttcgatataactattgtaggagaatttacctccgatactcaatcctttagtaatagcatgtaaatcgtagttcagttttacagttccttccaaagcactgtcgttgtcctttctatatccctgatagaggaatgcgtgtagtgggttggctctcacaagatttggaacggctgcaaaagttccgttttcgttgactagcgggaatgcattggcaggtgtacgggtcatattgttaaatgcacggctggcatctccttcggagttgggacggttcttgcttccggtacgatagctgaagtcaacgccaatactgaagtctttagtaacttgtatatctaggttggttcgtacgttgaaacgattatagtagtaggcagagttgtagtctggttgctggagtaaattatccagttccgggttaatggcaatcaatttggccagatctggtttcttttttaatttttcgatatcagtttcgtaggttccgttctgatgaaaatagcctaatgacacaaaatatttaagccgttcgtttcctcccgatacattgacattgtacttttgttgtgtacctagtttggtaaacatatctatatagtcgttgtccggatgagtaaacgggctggactggttgcggtataattgcatatcatgctctgtatatttcggtgcttgcccttcattcaccaaaccttcattcatcaatgttgcatattcttcggcattcaccatttttgtaatacggttgatttgtgtaataccgaactcaccggagaaagaaactttagctttaccggaattaccacgttttgtagtcacaaggataactccgttcgctccacgtacaccataaacggcagtagcagatgcatctttcaatacggaaatactttctatttcgtccgggtcgatttgtgaaaagtcacgttcgatgccatctaccataatcaacggagaagcatcgttcaccgtagcacggccacgaatatagagtgcggcagcgtcttcaccgggacgtccgctggtttgacgtgttaccagtccgggaatacgtcctgtcagactgtttgtgacactggaagtaggaccttgtttcagttcccgattgcccacagcagaaatagatccggtaaccgatacctttttctgttgcccataagctacaaccactacttcgtccaaggtttgtgtgtcatcatggagtcttacggtaagtgtctttccatctttgggaacggtaacttccacagttttcattcctatcattgaaatagcaataatagccttgttactggttacctttaatgtgaatttgccgtcaagatttgtaattgttccattactgggttgtcctttttctaccacattggcaccaattaatggttcgccggcggcatctgtaacaacacctcttacggtttcttgtgcttgcgctcctatgaaccataagctcattagtagcattaatatataccattttttcatattatacgatttttagattgttatctccaaccgggattctgtactaaatttgtatttaactgcatttctgagtaggggataggagaataatacatctttgtattaaatttcctttgtccgtcgacaacaaactcatgtgtggacacaactccattatcttgccgctctattctgaatcccattagtggctggttcaaatctttttcggctgttttccatcttctcaagtcaaaatagcgttgatcttcgaatgccagttcaacccgtctttcatttcttattttctttgtcatttccgtttgagaagttgtagtgtatgggactgttattcctgcacgtgttcttactttattcaaagcttcgagagctgtccaccccaaatcggctgcatcattcggtccgtatgcttcgttcatggcttcggcgtatagcaaatagatgtctgccaagcgaatgacagggaagtagtggtaggtactcgttattgtttgagctgacagatttatattcgtatcaaggaatttgcgtaaataataacctgtaacggtagaacgaagattgactttgccgatagcatcctgactgttggggtcgctgatgtcgattgctcctcttgctcccaaaatacttccgtcacgaacgatcgtaacatcaaaacgaggatccatattctcgaatcgggtatctgattgcatatcgttggcactaccatccttcttctcgaaagcgcataccagattatgggaaggacaagtacctcccgaacccaacagtgaaggagggtaattgtaaagttccagcatatagttttttggatttccggtatatactatatattcagtattttggtttggctgtatgataaacagtttttcaaagtttgggtataaatacaatttactcggagcaaggtcaattacggttttcaaagctttagcagcaagtttccacctttcttgtacgtttccgtcagtatagccgagtatcggattttgtgcattgttgaataatggactcgctgcgtacgccagcgtttttgccttaatagccaacgggcatgtactggctgataaaaaaccaaaaccacgatattgattcgtgatataattgtagcgcgtaaatacttcgctggcttcattgcataaacttacaatataatcgacgcaatcgctgaaattattgcggggtaatgttataatctctttatcatcaagagtatatgtctttttcacgagcggaactcctccataccttttgattaactcgaagtaatagagtgcacggaccgatttactctctgctatggccagttctttataactttcaacttgtgcatctgtccaacctgcattgttttgtaggagaggaatgtactgctcgaaataaagtgtacgccggataccaatgtataaatcggcccaacggttttctatcggactaatttcggttgcgtatccttgtcccagtttatacattgcattggcggggtctacataagcaccgtcatctgtagatgcgtcgaggaatgctgtgtagttgctttggtatccattgggcatggaaacgtaaacgctattcagcatttggattgttttgttataatcaataaatgtctcttccggttgccagtattcataaggttgttggtccagatagtcgcatgaagaaactgcaagagcaatacaacctgttatgagtatatgtttaatcgttctcatagttagttaaaatttaatgtttattccggcgctgaatgagcgttggagcggataagcgacaccattgccataggcctccgggtcaataacgtctagtttatcgaatgtgagcaggttctggccatttaagaagatacggagttcttcaagaccaatggaacggaccactttggttggtagattatacgacagttctacattctttagtcttagataagaggcgtcccgttgccaataggtagacgaaagactgttgttgcttgaccctgcagctttagttgtaaatcttgggttgttgacagaagggttttccggtgtccaactatttctttggtgttcatacatatttccgttattgtagaatgcaaacgctgtgtatgaagatagcattttagatactttagctgccccttggaatagtacggacagagaaaatcctttatagcttcctccaagactgaagccatagaacacttgaggaacgtccgtgtatccgtaacgtacccgatctttttcatctatcttaccgtctccgttgatatctttatatcgtatgtctccgggaacgacgctgttcaatgtgtgaacaggagctgccgcaatttcttcatacgattggaaaataccatcggcaatatagaccagtgaagtaccataaggatgtcctttggaatacatatagtcatacggttgcaaggcttcgtccatatcaatgactttgtttttgctgtatgaaatgttaccactaaggaaatatgtgaaatctttacctatgttatctttccagtttaggctggcttcccaacctttggtttccatttttccgatattcttgcctggcatatagatagtagtatatcccaacatggatgaaaatgtggagggaatggtgtatacaccggtgcgacgatccttccaaatgtcgaatgttgcgttcaaacgattagaaaacattcctaagtctgcacctagattcatttgagtagattcctcgtaggtagcagaaggattggcttgttgggtttccaatagagaagtatattgtaccatgtcattaccaaaatagattccttcattcaaattctgaagacggctcatatacatatacgcagatactgcacggtcattattgatcttaccgatactaccgcgtatctttagattagaaatagcgggctttaacacatcaaagaatttctcattggatacataccatgctaaagaaacagtaggagacaatccccagcggttttcattattgaatttgtaagaaccttgataaccgaaagtggcatctatctggtatctattatcgtatttatatgcaaaccagccaccaactgtttgatagcgatagggaagcacaatactttgattgtattcatattggtcgtaaaacatcattcccgagacattgtgcctaccgaaaatacgattgtagctaagcttaaaatttaatgtggtgttacgtgcatcaccatatttcatggcagcatttgatatcatttcttcactagttccatatttttggagtactccgttattttgaagtgtgtaataattgaaagagcgggtacggttttgtttttgtaagttgtatacgtccatagaaatctgtccgtagagcgataaacccttcagaaggaaatccagatcctgtttcagtgatacagaaaaggcgccataacgtttatcgatcgctgtgtagccacctctgttcaagatagcccacggattaatatatttatcattgcctgctacaatacggtctcccggttgtgatttgataggattccctgactggtctacatagctatgagtatctttatagtacattgggaatgccgtagccggcgttttcaacaaattttggaatatatattgttgtgcttggtcgtaataaggtgagttttcactttgcatccaaccgtctaatttaacagataaaagggttgtggaggtaatgtcgaagtctacgttcgagcgaaagttgattcgggaaaattctgtgttggtactgtaattctgctctttttcagtattaaacattcctgcttgtccggtatatcccaatgagacgaaataacgggtacgcccggaacctccttctactgtggcattatatcgctgcatgaaagttccttttttaagcaagtttcctatccagtcgacatctgggtagcgctccgggtctgaatgattggcgaatttattgatctccgtttccgtgtagaaaggattcaaaccgtcattaatgttcgcttcattgtaggattgagcatattctgccgcgttaacagctttgggaactctcatgttctgctgatatatcccttggatgttaaggctgactctaggttttccgagacgtccggatttggtttcaatcaggataactccgttcgcgcctcgcataccataaagagcgatagcagaagcatcttttaatatggtcactctttcaatttcctgagtttgtaccataccgtagtaattgcgttcttgtccatcgattagtacaagtgcgccatttccattgctacgtattccacgtatataaatggaagcttcgtcattgcccggttctccacttcgctgaatcgtagttaaccccgatattcttcctgacaatgcattggataaatgctgtacaggcacattctccaatactttaccggagattacatcggatgcaccgctaaactctgtttttaacttacttccatagggtatggaaatgattgtcgagtctttttcattcttttccttcactgttttgtcctgtgctgaaatgatggttgaataacctgcaagtgagcaaaatagcagaaagaacttgatttttaaagttttctttctcataaatattaaattaaggggaatattttataatattcagtttagaataagtcgtagtagaacttagcctaatttaatctatatctatgataatcagtttgttaaagttgtgatatttattaaaaaagagtaatggtataaagttggtatctaaaaaagtagatttaatttgcgggagaatgcaaaataaatgaaatattagcttgatattttaaaatcaattaatatatttgcggagaattaaaaacaaaatgaacttttaaagcaaaatcgcctatggagagctaagcacttctactataatttagaaaattattaagttctactacaacttagctattaatttaatcttttagaaacataaataagaaaagggaaaaactattttttaatggtggttatatgtttgtcgtttagtaatcgtagacaaaatgatcctatttgtgctacctaaacagggaattatataattaactatctatctaattatctaggtaagtttttaaaacctctgctattttctcatatcctttagtattaggatgaagtccatcgctgaataaggatgaattgataatgccatttttatcagtcaacagattgcttaagtttatataaatacaatcctgttctagcttcttacgaagttctttgttaatttgctgaatacgtttttctgtgtttgctcttgggaggattcccattacgcataatttagcttgtggttggcgtattttaatagcttcggtaacctgaagaataccttgcagaatttctttatctgtattaaattgaagattattagttcctatcagtagaaaaatcatatttgctttgaaaccgtccaattcgccatggtagatgcgccacaatacgttttctgttttatcccagccgaaaccgagattgcgaactgacctgtttttgaatagcttgtcccaagcttcttttccacgttgtgtcggtgcagtaggctcgccggcccagtaatgcgtgatagagttacctatcataatgatttccggggcattttctcggtttaatttaaggatttcttcatgacgcgcgtaccaatcataggaatctctttgttgtttgcatggaatacatgaagtgggaccttcattcttttcatgtaatatttcccgtatcttttttaaataactgtctgcatattgctgcatacctaaatcagtagaatgaactccgtctaccataccgtctgccggaatacctatttcttcctttgtcagataatagatatccggaatttgttcttcttgtaaagtattgtatgcttttcgcaattcagtattagctacgcggtatgattcttctgctttttcggaagtgacatcgttggcatatccgtcatgctctactagtaaaataggtgctttgctggtttcgcgtaatttctttactccttttaaggtacggtcgtatatcacttctgcactctttcctggtaggttgggcatacagtcaatgataaacagttttgcatcaatctcggacaataagtcgaatagttcgctctcgagtttgccattgccggagaatcccaaattgatgacgggatgttccgactttctatttaaaatatttccccatgccatacccggacgggaggcacaagccccttgtgcaatggaagttccgtaaataaccaggggtttttcttgtgagacgggaagaaaacggaaagaagtgttctcgggtacaccgatttctagccatgacacactgttgtaaagaggtagaaataattgatattcaaaaccttttccggtttttgcggcatacgaaagtccgctaaaatcgtatgtaatggtatcctgcataacataccgtccaacacaccaacgctcttgaccattattgtcggttgcatataaatcaatgccagagacaccagttgctggcatgtgtggcatggaaagagcgcctttcacaacataacgaatttttatttccggagcattggaacgaaatgcaatggagagtcctgcgctttggagtgataagtcccataccgcttttcgtactttatctttagcccgttgtggaagtcgtgtgtaaaatcctgcgggatcttcttgccatgcttgtccacggacgaccggaaaactttctttttgtggattgaaccacttatattgtgctgttagtgataaagtgcaacctaaaaaaagaataaaaagaaagaggtgtaaatgtgttgttttcataggtggtataaataatataacttaatttatataatgagcttctgtgcatcaggaataagaatttcttttcgtcgcaactcaatcaatcctttatcctgtaattcgttaagtgctttggaagtattcagacgggtatcgtctaaatagcgagctaaatcatccatttttactttgaatatcttttctccttgtgttttctcgcaatgcagtaagaagaagcgggaaatcttctcctttaagtctatagtcggttcttcccatagtcgggagtaaagattttgtgcacgattgctgacaatattcatatagttgagccggaatatatcgtaattaaacaggtcgctaagtacgaaggctttactaatactgattgtgtgggcttctgtatgcgctatataagaggatgcgtaattcgtattcatgccgaataacgattgtggctctatcagatatggtgcttccatttgctcaatgacagtgtatatgttttctttggaagtggtgacgatagatactttaccttttaacaggaaacggagttgcttacaaggactaccattctcaatgatagtttctccggctttatgcttgataaaatgtagctttaccttatccaaaatactagtgaaatcttcatggcaaagaccttgaaataaaggcaattggagcaaagtgtcgaacattgtttccatacgttgttatctcttatttattgtacaaatttactcattatacaatactgctgtcaacatctgacccttctttttgttttttttattgtttgaatgcataaaaatagagtatatttgcagaaaaaaaggaggaaattatgtttgcaggctttaactggcaacagatgattagtgcgtttatcgtgctttttgcggtaatagacattatcggttctatacctattattattaacctgaaagaaaaggggaaggatgtgaatgcaatgaaggctaccgttatttcttttgccttattaatcggtttcttttatgcaggggacatgatgctgagactcttccatgtagatattgaatcttttgctgttgcaggtgcatttgttattttcctcatgtctttggaaatgattctggatattgaaatcttcaaaaatcagggacctatcaaagaagctactctagttccgcttgtttttcctcttttagccggtgccggagcttttactaccttgctttcccttcgggcagaatatgccagcattaatattatcatcgccttggttctgaatatgatctgggttttctttgttgtgagtatgaccggtcgtgtggaacgattcctcgggaaaggtggtatttatattattcgcaagttctttggaattatcctgttggctatctctgtcaggttgtttacggcgaatataacgttgttgattgaggcattgcataagtcctgattggaaaattcctccttcggattctcctcttcttcctcgtcatcatccttttcatctgcaaaaggttccgggcgttgaggcccgtgattcacaaaagctagggcacagagtgttcccataattccaccgcttagatgtccttcccacgacatattggcgggagagaaataggggaacatatgccagataattcctccgtataaaaaggtgacaagcagagaaatggcaataagtggtacgtatttgcggagaatgccactgaaaaaaaggaaaaaggcaagaccgtagattaatccgctggcacctatatgccagcccggtttacctataataaaggtaagtagtccggcaccgatccaaatcaggataaaaatttttcccgctattccccggtaaaagtaaaaaagacaccatgataagaaaaatagcgggagcgtattagccaataaatgactgaatccactgtgtatcaacggatgagtcagaataccgaaaactccacgtttttccataggatatatccccaagtgagagagatcccaatgcatcccgacctctacaatcttgagcatataaagaatgaaaataagaaacaatggctttgctgcagctagcatgatacgctgaatatcttgtttcatgactttcttttctttagatattttacgcaatactacgaatatttgcacaaaatctgaaaataaaaaccctttttatttttgtttttatctagaatttgtacatttggacattgtacctgttatatatggtgctacaaccattctgtatgcgatatagtaataaatacaagtatgatataatagccaataattaacctttaaataatgcacaactatgagttatttacgatttgacaagaccctcatgacgaatctggaagaatctctgcagagagaaattctccggacgaacaaggcaggagcttatcattgtacaacgattgttgattgtaacacacgcaaatatcacggcctgttggtgattcccgttcccaatctcgacgatgaaaatcatgtgctgctatcttctcttgatgaaacggtaattcaacatggtgcggagtttaacttgggattgcataaatatcaggggaacaactttagtcccaacgggcacaagtatatccgtgagtttgattgtgaacatatcccggcgacaacttaccgtgttggaggagtaattctccgcaaagaaaaaatctttgtacatcatgaaaatagaatcctgattcgttatactttacttgatgcgcattcggcaacgactttgcgcttccgtccgttccttgctttcagaagtgtacgtgagtatactcacgaaaatgcacaggcaagccgcgagtatcaacttgtggaaaacggtataaggacttgtatgtatccgggctatccggaactgtatatgcagttgaacaaaaaatgtgagttccatttcctacccgactggtatcgtggcattgaatacccgaaggaacaggaacgagggtatgatttcaatgaagatctttatgttcccggttattttgaggtggatataaagaaaggggagagtattgtattctcggccgggacttcagaaatatcccctcggagactgaaacagacatttgaggcggaagtggctgatcgtacaccgcgtgatagtttttatcactgtctgaaaaattctgctcaccaatatcacaatcaacaggaaggtgaacattatatccttgccggttatccatggtttaaatgccgtgcacgcgatatgtttattgctttgccggggctgacgcttgctattgacgaaatcgaccagtttgaggatgtgatgaaaacagcggaaaaagcaattcgtaacttcattaatgaagaacctgtgggttacaaaatctatgagatggaacatcctgatgttttgctttgggctgtttgggctctgcaacaatatgcaaaagagacttcccgagagcaatgtcgtcagaaatatggagagcttctgaaagatatcatggaatatatccgtcagcggaaacatgataaccttttcttgcatgaaaacgggctgctttatgcaaatggtacggaaaaagcgattacatggatgaactctaccgtaaacggtcatccggtaattccccgtacaggatatattgttgagtttaatgctttatggtataatgcgctgcgttttgtggcagatctagtgcgtgaaggtggagatgcaatttttgcagatgtacttgacgcacaagctgaagtgaccggaaagtcatttgtggatgtgttccggaacgaatatgggtatttgcttgattatgtggatggtaatatgatggattggagtgtacgccctaacatgatatttacagtagcatttgattattctcctttagatagggcgcaaaagaaacaagtgcttgatattgtgactaaggaattgcttaccccgaagggaatccgttcgttgagcccgaagagtggcggatataatccgaattatgtaggtccgcaggtacagcgggattatgcttatcatcagggaaccgcatggccttggctaatgggattctatctggaggcttatttgcgaatctataagatgagcggactgtcattcgtcgaacgccagttgattagctatgatgatgagatgacaagccattgtgtgggctccattgccgaactatttgatggaaacccacctttcaaaggacgtggcgcggtatcgtttgcaatgaatgtggcagaaatattgcgtgttttaaagctactgtctaagtattattaaaaaaggaggaacgaagatgaaagttttaatgtttggatgggaattccctcccaaaatatatggtggtcttgcggttgcttcttatggaataactaagggattgagcttgcaaggtgacatggaaacaatcttttgtatgcctaagcctagcggcgaagaagaaaagttcttaaaaataatcggtatgaaccaagtacctattgtatggcgtgatatcaattatgactacttgaagtctcgcttgttggagatgtctccggaagaatactattctttccgcgatcatatttatgccgatttttcttatatgcacgtcaatgatttgggatgtatggagtttgcaggaggttatcccggaaacttgcacgaggaaattaataacttctcgatcattgccggagtagtggctcgtcagcaggaatttgatattatccatgcgcacgactggctgacttatcctgccggtgtacatgccaaaatggtaagtggcaaaccgctttgtattcatgtacatgccactgatttcgaccgttctcgcggtaaagtcaatcctactgtttattctatagagaagaacgggatggatcatgctgattgtattatgtgtgtatctgaacttactcgccgcacagtgattaacgaatatcatcaggaccctagaaaggtatttgctatgcacaatgctgtttatccattgtctcaggaacttttagatattccgcgtcctgaacatccaaaagaaaaagtggtaaccttcctcgggcgtataactatgcagaagggaccggaatactttgtggaggctgcggcacttgttttgcagcgtactcgtaatatccgttttgttatggcaggttcaggcgatatgttgaatgccatgattaacttggtggcggaacgtggtattgccgatcgcttccatttccccggctttatgaaaggtaaacaggtatatgaggtttataagaatagtgacgtatttgttatgccgtccgtttccgaaccttttggtattgctccgttggaggcaatgcagtgtggtacaccttctattatttcgaagcaatcggggtgtggtgaaattcttgataaggtgattaaaaccgactattgggatattcatgctatggctgatgctatttattctctttgcaccaatcaatctcttttcgagtatcttcgggacgaaggaaagaaagaagttgatgggattacttgggaaaaggttggcttgagaattcgtgctctttacgaggatgtgttaagaaactatggtaaataacaaaacaataaataaaaatgagaactatctgtctttattttgaaatacatcaaattatccatttgaaacgttatcgtttcttcgatatcggtaatgatcattactattatgatgactatgcgaatgaaacaggtatgaatgaagttgctgaacgttcatatctccctgcccttagtacattgattgagatggcgaaaagttcgggtggtgctttcaaggtagcgctttctatctcgggagtagctttggaacagcttgaaatccatgctccggcggtcattgatttattgcaccagttgaatgatacaggatgttgtgaattcctttgtgaaccatattcacatggcttatcatcactggccaatgaggattgttttcgcgaagaagtacttcgccagcgtgataagatgaagcaaatgtttggtaaagaaccgaaagtattccgtaattctagcttgatttattccgatgaaatcggtggcttggtagcttctatgggctttaaggggatgttgacggaaggggcaaaacatgtgttgggctggaagagtccgcattatgtatatcattgtaaccaggcacctagtcttaaattgttgttgagggacttcaaactttcggatgatatcagtctgcgtttctctaattcggattgggcggaatatcctttgtttgctgataaatatatcaactggattgatgtgctaccgcaagaagaacaagtaatcaatatttttatggaattgagtgctcttggtatggctcaaccattgtcttccaatattcttgaattcctgaaagcattgccggaatgtgcgagagctaaaggaattactttctctacaccgactgagattgtaacgaagttgaaatctgtttctcaacttgatgttccttatccgatgtcatgggtagatgaggaaagagatacgagcagttggctgggtaatgttcttcaacgtgaagcttttaataaactatatagcgttgccgaacgtgtgcatttgagtgacgatcgccgtatcaagcaggactgggattatttgcaggctagtaataacttccgttttatgacaacgaagaatacaggtatctggttgaatcgtggtatctatgactctccttatgatgcttttaccaactacatgaatatcttaggtgactttatcaaacgagttaattctttgtatcctgaagatgtggatagtgaagaacttaattctcttttgactactattaagaatcagggtgatgagattactgaattgcagaaagaagtagctaagtggcaagcaaaagccgaaaaggaaacggctgctaaaaaaactgcggccaagaaggctgttgtggcaaaagagtcggtggtaaagaaagaacctgctgcaaagaaatcagcgaccaagaaaactgctgaatcaaagaaagcggtcggacgggccaagaagactgttacaaagaaagaagaataaaataaaattctatatacaacagaaccgtgagtgagatgtatatcagactcacggttctgttgtatatagaaaatagtatttaataaatatcctttttaaaataatagcgcagattacacaattagtagtccgcgctattttttatgatattctcctgctatttatttcgctttcgtagaaccaaagtttgtagagacaacttcgagttttaatatgttttctgggtatacaggattgccctgagaatctttctcttctccttttaatccacctttcaagcgtacataacctggttttaagtcatgttggataccaatgacattagaactgctaccataataaccgtttgaactggcatctgttgttacaagtactggaattagtatggctttattccaatcactgagttcttcccagtcttttatgttattaacagtatggttctctattttcccttcatcattaaatgtttggaaagtgatagattttttctcttgtatttccttgtctgctgctgctctatcttttaaacagtcatttatcaatttagtgatattattgtacgtgtattcagtgagattagttgtagaagaagtcggggtgaatagcgatgaagtaacgccatcacttagttgattattctcaaagaagctttctttatattttttacgtatcagtaaaacgtttctaggcatagacatcccaaatttcttatcgctagtctcgttataaataggaattcctaatttaacggcgttcaatgtatcaccttcaagtttttctgctatttggctaacagggagagtgacctgagtaaaaataccagccggactttttaaataggtccaatcagaattatcaatacacttctgaatagcttctgtatcatttgctaatctattagcttgaataatttcacgtgtagaattgaaggtgcggccagtatactgtatagagtccttttccgcattaactttagattttagcttaattccagtaatactatctgttacatattcaatggaaacaacatccatttgtacttgactgatataaagtacagtaccgtctccatagtcactttttacatatatgccactgaatagatcaggaaaagccttgtagaaatcttttctgtcagctttgaaaagtttctgtcctaatttctttgctttggcttgatctaatcgaatacttacacttggcacgtatgtatcaagtttacgaatagaatcacttactgataaatctacggcagtatatgctttagttcctaataaatctgattgtttgtaataatcctccggattaatattggtataatatgcctcttcttcattcaaccttttatctaattcgtagatgcttaaacggcacgcagttagtgagtcaccgaaataactactataccataggtagatatttatttggcaattgcctattacgtgattattctcatctttgattaaagtaaatctatctttaatcttactatctatttctatattatcaaaactagtaaccaaacttcctgtggctttagtccctgcttcattttctttgtacatttcagagaaactcaatccttccggacagttcagttcagataaaaagcctgcctcatatgtaccgaatgtatcatctgtgaattttcccacgtatccggtgctggtctttgcatatacttcacctgcgtgtacagattttgttgttacgtcaaatgtagtcagttttccattgatattctggtcacttcccggaaacattcccagtcctaatccggctgtgttatcgtcacatccgaaaaaagtgattgccagtaaagctattaaagcgtattttgctttcatgatcgtcgtatcttgatttttattcttcttctttgttcgcagtggcatcccatacctgatcgtagaactcgttgcaagcatctgcatagttctccgggttctgataatcaagtatcagtttacctgattgacgggcatattcaatgatagattcattcacctttttgctgttttgtatcactccgtccgaataatccacggcgagtttgcaaagggcggcataatctaccggttcttttaagttgcttaaatcatccttagatattcctttcaacattaatttagttgcaaagtcgtcactgagtgtatttttgaagtcgtcttcatatacagagaatacaactttggcatcacggaacgacggttcatccttgtacgctttcttaatataaagaggtgctaacgctgtcatccagccatgacagtgaattacatcgggacaccagcgaagtttcttcacggtttccaatacaccacgcgcatagaagatagcgcggctgtcgttgtcgtcatactctatgccgttttcgtccatagcctgcatccgattctggaaataatcatcattatcgatgaaatatacctgcatacgtgcggattggatagaagctacttttataataagggggtggtcagtatcatcgataatcaggttcataccggagaggcgaatcacttcgtgcagttggttcctgcgctcgttaatgtttccccatttgggcataaaagttctgatttcacggcctttttcttgtatcgcctgtggaaggtttctacctatattggccatttcggattctgaaacgtaaggtgtaatctcttgagtaataaataaaactttattcgcctttgtcataataacaatagttctctataatattctgcaaagatacgaaaaaaaagacacattaaataagatattctttctttatgtggcaaatattagtttattttgcagagtttttgcaaacgagtaaaacataaaccaattgacgaaaatgaaaatagtgcacactatcaaggacttacaggtcgaattgactgccctgagagcccaaggtaaaacagtaggattggttcctacaatgggtgctttacacgcaggacatgcatctctggtaaagcgcagcgtaagtgagaatggtgtaactgttgtgagtgtttttgtaaatcccacgcagtttaatgataaaaacgacttggagaaatatccgcgtacattagatgcggattgctgcttgttggaagaatgtggagctgcatttgtatttgctccttctgtgagcgaaatgtatccggaaccggacacccgccaattcagctatgctccattggatactgtaatggaaggtgcattccgtcctggacatttcaatggtgtttgtcagattgttagcaagctgtttgatgcggcacagccagataaagcttatttcggagagaaagatttccagcaattagcgattattcgtgaaatggtccgacagttgcagtataaactggaaattgtaggctgtccgattgtgcgcgaggaggacggattggctttgagtagccgaaataaacgtttatctgcacaagaacgtgaaaatgctttaaatatttctcggacattatttaaaagtcgtaactttgcagtctctcatacagtaaatgaaacgcaaaaaatggtggaagatgcgattgacgtagctccgggattgcgtttggagtattttgagatagtagatggaaatacattgcagaagataaccaattgggaagatacttcgtatgcagtaggatgtatcacagtgttctgcggagaagttcggctgattgataacattaaatataaagaataactaaaaagacgaaaccttatgatgattgaagtgttgaagtcgaaaattcattgtgcgcgtgtcacggaagcgaatctgaactacatgggtagtatcacgatagatgaagatctgctggatgcggcaaacatgattccgggagaaaaggtgtatatcgctgataataataatggcgaacgctttgaaacctatattatcaaaggtgaacgcggttccggcaaaatttgtctgaatggtgctgccgcccgtaaagtgcaaccggatgatattgtgattatcatgtcgtatgcgttaatggattttgaggaagcgaagtcgtttaaaccgtctgtcattttccccgaccctgcgacgaacaaagtagtaaagtaaaaaagtatctttgatatttttataagaaaaaccctgtcttacagaatgtaagcagggcttttcttttttatctattctattttcttgttactactttgtttttaactgttcgttcatagccgccgctgccttacggccgtcacccatggcgagaatcacagtggctccaccgcgtacaatatcgccacctgcataaatcatcgggatagaagatgccatgttctcatctacggcaatcgttcctttccgtcctaactccagtcctttgatagaactagggacaatcgggttcggcgacactccgacacttacgatagctaggtcaatatcaatcgtttccgtagcacctgggatagcgacaggactacgacgtccagaagcgtccggttcgcctaattccattttttgtagaataacctgttttacacaaccctgctcgtctgcaatatattcgataggattgtgcagtgtcagaaattctactccctcttcttttgcgtgtttaacttcttcgatacgtgcgggcatttcttcttccgaacgacggtagataatcatggcgcgttcggcacccagacgtttggccgtacggacagagtccatggctgtgttgccgccaccgattactgctacattcttaccgaaagctatcggagtatcagagtcttcgctggctgcatccattagattgacacgggtaagatactcgttggaagacataatattgattgagttttcgcccggaatattcataaagttaggaagaccggcaccggaagctacaaatatccctttgaaaccttcctctttcaggtcttctatactaattgtttttcctacaatacagtctttgataaagttaactcccattttggctagattgtcaatctcaacatcaacaatcttgttgggcagacgaaattcaggaataccatatttcagtacaccgccaatttcgtgcaatgcttcgaatacagttacgtcatatccatatttcgccatatcacctgcaaacgataatcctgcaggtcccgagccgataacagccactttgataccattcttttcagcaatgactggtacggagatttgtccgctctcgcgttcgtaatcagctgcaaaacgctccagataaccgatagctaccggtttctcattcattttcagatgaatacactttgattcgcattgtttttcttgtgggcagacacgaccgcaaacagccggaagtgcacttgtctcttttaatgtctttgctgcttccagaaattctccacgctcgatgttcttgataaaacggggaatgtcaattcctaccggacaaccttccatacatcctgggtttgcacagtcgagacaacgtttggattctgttatagcctgttcagcagtcaacccttggtttacttcttccttgcggctatgtgaacgatattttgcatcgagttcgttcatctcaacacgcgggatagccgtgcgttctttggctttcatcgacttacgcaactcctgtctccaggcaacattacggcttttttcgtcggtctcctttgtagcttcgcatacagtgtcgagtttgtgcatttcttctcgttcgatgtttttgaatgcccccatgcgtttcagcatttcatcaaaatctacttggtgaccatcgaattccggaccgtctacacaaacaaatttggtttttcctcctacagtgatacggcaagcgccacacatacctgttccatctaccataatcgtgttcaatgagacgtcagtgggaatttcatatttcttggttagcaagcaaacgaatttcatcatgatagcagggccgatagcgaagcatttatccactttctcgcgtttgataacttcttccacaccttccgttaccagtcctttgcgaccataagagccatcatccgtcatgatgataacttcgtcggagcttttgcgcatttctttttcgagaatgataaggtctttattacgtcctgccaatacagtgatcacacggttgccggcagctttcaaagcttgtacgatagggagcattggggccacacctacgccaccaccggcgcaaacaacagttccgaagttttcaatgtgagtcgcttggccgagaggacctactacgtctgtaatataatcaccttcgttcaactcacagaggcgggtagaagatagccctacctcctgtatcaccagggtgatagtgcctttctttatatcagaaccggcgatagtcaaaggcatacgttctcccttttcgcctacacgtacaatgacgaagtgtccggccttacgagatttagcaattaaaggggcttcaatttcaaatttgaacaccttttcagaaaagcgttccttgctaatgattttgttcattatctaattaatttgttggttttattacgtaactgctaacagaatgttataaattatggcaaagatacagcttctttacgaaaaacaaaaagaaaagccactcttttgaagagtggctttctatatacagatgaatctatctgtttatttcgtacggattttgtacccggctactccataatacaagatgaacaggaagcaaggtaaacacagccaataagcttgttgcgggcttgctacatcctttagccaaccatacagggtagggataacggcaccaccgaacattgccatgataagcaatgatgatccggctttggtaaacttgccgaggtcggccatggcaagcggccacagtgccggccacattaatgaacatcctaatgccatgaatgaaataaaatagatagatatatggctcggagttagtactaccaacaatgaaccgataatagccaggatagaacaaatttttagcgcagtagcttggctgagatatttcggaatgaaaataataccgcagatatagccgatcacaataccgattggagcaatccaggcataattagctgcaccttctagtccaagttcttttgcgtaatcgaccaatgtacccaatgagacagtttcaacacctacataaaggaataaggccaggcagcctagtaataagtgaggaaattgaaaaacagacgtttttgtggcagcatatggacaggcttcggcttcattctcgctttcgtcttctcctgccgcttttacttcgggcagtggagcgaagaatgccataatacccaaagctataaaagcacagatgatgataatgaacggcttgttcagatcttcgataccaatcagattgacatctttccccagcaaccatacgataaagatagcggggataggccatgccaacttattacagatacccattatgctaatacgttttgctgcactatccaacgggccaagaatggtgatgtatggatttacagacgcttgtaggtatgcattggctgctccgctgataaaagaagccagcaaaaataaggtgaagctttcctgatctgccgataagatgaacaggtagaatgctatggcaaaaataaagaaagacagcgacatggtacgtttgtaacctattgccttaattgtgagtccggcaggataaccgaaaactagaaaaggaatgaatgtcgcagcgataatcagataagaagccgtattcgagattcctaatgatttttgtaataccgggactaataatgaattgattccgagtgcgaaaccaatcgcgaaaaacataatgccaataaatgtcaatggcaacacaaagcttttagtgttttttgtcatgggggaaatgtgttaaaggttatataaaaatctcttgtaagaaaaggatatacctgattcttacaagagtgaaaaattcttagtctatcatatcgaaaccgcagtatggaaccaatgctttcggaattttgattccttcaggtgtctggttgttttcgagtagggccgcaacgatacgtggcaatgccagtgctgaaccgtttagggtgtgacaaagttcagttttcttttctccactacgataacggcatttcagacggttggcctgataggtgtcgaagttggaaacggaacttacttccaaccagcgtttttgtgcttctgagtatacttcgaagtcgaagcaaagcgcagcggtaaaactcatgtctcctccgcaaagacgaagaatgcggtagggtaattccagtttttgcagcagtccttctacatggtcgagcatttcctgatgagattgcttggagtgttccggtttgtcgatacgcaccaattctactttggagaattcgtgcaggcgattcaagccacgcacatccttgccataagaacctgcttcgcgacggaaacattgtgtatatgcacaattcttgataggcaattgtttttcgtctaggatgacatcgcgatagatattagtaacaggcacttctgctgtcggaatcaaatataaatcatctacttcgcaatggtacatttgtccttctttgtcaggaagttgtcctgtgccgtaaccggaagcggcgttgaccactgtcggtggcatgatttcaatatatccggatttgcgtgcttcatccaggaagaagttgataagggcacgttgaagttgtgcaccttttcctttgtatacaggaaaacctgctcctgtgattttaacacccaagtcgaagtctatcaaatcatatttttttgccagttcccagtggggaagtgcatctttgggaagttcggtttccattcctcccattttttcgacgacattgtcttcggcacctacaccttcgggtacactgtcataaggaatattaggaatcgtatagagtgcattctgcatatcggtggcagcttgtgtcattgttgcgtccaattccttattaccttcttttaattctgctacacgtgcgcgtgcggtttcagcttcttctttcttgccttccttcatcagttgtccgattgtgcgcgaaagagaattaacttctgccagatttttatctaattgattttgggtactacgtctcttgtcgttaagagcaataacctgctctatcgtttcttttgcatttttgaaatgcttcttttccagtccgcggattaccgcctctgtgttttctgtaatttgtttaatggtaagcatatctatactttttatgaactttcacttaatggatgcaaagatacagaaaaaacgaacaatcaagcaacgaaaatatctaaaaaagaaaaggagatgcaatcgcttggattacatctccttcttttaaatattctcagttgtgcaattatgcttcagttgcaggaattacagaaacatatcttctgtcttctttacctactttgaagtttactgtaccgtctactaaagcgaaaagagtgtggtctttacccataccgatgttgtcacccgggtggaattcagtacctctttgacgaacgatgatgttacctgctttgcaagcttcgccaccaaatatcttaacgcctaatcttttacttgctgattcgcggccgttcttagaactaccgacaccttttttatgtgccatttctttttactgtttttaattgattaagctactacttctgtgattgttaattcagtgaactgttgacggtgaccgttcagttttctgtgaccttttcttcttttcttgtggaaaacaagaactttatcacctttaaccaagtttgaaacaacctggcaaataactttagcaccttctacgataggagcacctacagttacgtttccgtctttgtctaccaaaagaaccttttcaaattctactgttgaaccgttttctgcaccttcgatgtggtgaacgaacaacttctgaccagcttctgctttgaattgctgaccgttaatttctacaattgcgtacatcttatataataaatgtataagttagctccggcgggtggtctttaatcacttagagaactctttatcaaacccgttgcggaataatcgggcacaaaagtactgtttttatttgttttcaacaaatatttcttttgtttttttagttgtgttgctattactttgctcatttatagaatagtatgcacaaacttcgttgtcaactattaagggggactttaaagtaaatcgctaagatttttcacaattattcggtgcggataagcgcgaagttcgtcagcagtagtcattccgttgagtacgcctgcaaaatcgactcttgcattccgagcagtttccgcatctacaatgctgtctccgatatacaaagtttctttcggggtacttctcaaatgttccaaggcaaatttgactccttccggtgaaggttttgcagctttgacatcttctccacctaccactatatcaagaaaatcttccggttggtactcttcgaggaaactcagtattctaaatcggtatttagtagagataattccgatacgggcactccgtttcttcagctctttcagtgtagataacgtgtcggggaaaagctgggtgttcacattcatgtgtacatcggcttccaatctgtattcctgtcggaaagcttcgagttgtattgggtcggtgattccggtaagaatactgaaagattcttccaatgttttgccgatagtacgtttgattgcttcatcggtaacggttaaatactggtggcgggtgagcacaattcggaaacacttaacgataccacgtgacgaatcggctagtgtatagtcgaaatcgaataaataggttttataattcattggggagaacttttccgcaaaagtactaaaatcttttcttattttacaggttctaccgtgtatccttgtttttttaataagtttagcaatcctttgtcaccgggaaggtgcagggcaccaactgcaataaaagtaggagctgttttcataatagccggaagtttttcagaccatgccttgttgcgattataaatcattgcgtcttcttcaccgggagtcgggtcacattgattgcctttacgctcttcgctgatacgaagcatttggtttaagtcctgtcgcatataggcgttagtgagttttttcaggctttccacttctgtattgatgttgttgatcgtacacattagcagttgtgcttgccgttgcagcgaataaccattgaataataaattgaattgaaattccgcagtttctagtccgtctacttttttcccgttttgggtagcttgtgattggaagaaggtatctagctgttcttgaggattaaatttgcctatatgttttacgtatactgccactactacgttgttcagcaggaatgcaggtttcagtttgggggctgcgcttaaatctagcatcaggttttctttgcagaatttgttagccgttgcaaagtcttcaggggagaggagggtggacagcgtactgtcgttggcgatcatcatagcctgttgcattttctgcatggtgaccggtgactgcatttccgacattttcagctctccatatacttgttgggtttctttcattgctttttgaagtccggcaatgctgtccataatgctgaatggtgccaagtgatgtgtacctataatgtaagagggctgatttagtccgttgccggatactttccataaaagttgggcgtttgcgctaaacgctacacagataaatagtactgctccgataaatgatttcataaatttatttcaataagagtgaatgatttgattgttaacgtattctaccaccgctgatccaatgcctgagataatagtcttcgtttagcctactgacgattaccccgcgacttgtgctggaatgaatgaatttcccacttttcagataaatgcctacatgagctactctctttctagaacgattactgctaaagaataccaagtcaccttctttgaggtttcgtttagctactttgttgctcttattcttcagttcttctgtgtttcgtggcacttggatacgatatactttccgatagatttgataaaccatgcctgaacagtcggtccctcttttcgaatctccaccgccacgataaggggctcctatccagtcggcagcttctaggtagagtttatggtcgtcttccaagttgatgtctatacccaataagacagaagctcgcgccagtgcctgataatccagacggggggcagatgtgcggcaggagctgaaaatgacggttagccctaccaatatgaaaaagagtttaaagttaatcttcatcggctgcctttccttttttgttgatgatatttattcttctacattgaagtacgcttccagctctttttctgcagaattatcttcattaattatatcccgaatgatgattccgtattccagcaaagcaattcgcggacacacatctacagtatggttcaggttatggctggaaatgataaccgtagcctgatgttcttcattatatcttttgagcagatgcttgataatggattgcgaactcgggtcgaggaaattgaacggttcgtccaatattaataattgtggataatgaagcatggcggagattataccaatcttttgtttatttccggcagaatagttacggattaattttttttgtcccattacttccccgttcatgaagcgttcgaaaggaacgaggcgttcatctacctcctctttctttaatccatacatttttccgatgaagtagaaatattcttccggggtcagataatcaatcaaaaaaccactgtcgataaaagcaccggtgaaggctttccagtcttcgtttaggcttacatcaatatcatttataactactttcccattgtccgctttcagcagatccagcattaaccggaagagagtcgtcttccccgcaccgttgtttcccaccaatccgagcatatcgccttgattgatttcgtagtgttctatatctacggcaatcttttcaccgaaattctttttgagcttgtcaatggtaatcatgattttcaatgtttatataattaatgacccatgtatgtctattggcggctgtctctgaaaccttccatattgtcatatcgccgttttatgaaacgatgatatacattctttatccatagcggagaagtcagggtgaatcctaaaccgatgatcagtaggatcgtgtaagtaattgtttctcctaaaagtgagtttaacaggctatataggataagcggcacaccgaatgctccgaagtttactaacatttgtattgcactattggtttggcggctcgttactttttcgtttagcggcacagtttgtttattgtaaacagccagttggaagaagcagaaatagatgaagccgatcgtataaaagaaccaggcaaaagctcccagcaatgtcagtttattcataatgatagcgggaaccatgagtaggaaaggaatgatttcgccaatactatatatataatatttagctttcaacaggctcataatagattctttgcgtgacatcaatccgtcgatataattgccctcgaacgacataatctgtgacaggataatcattccgaatacagcaaagttgtatacgcagatgaaagaagtcatcaggcgtccatcgtagacacttgagaaactgagtgcacaggaaaaagctaccaccacgatagcgacactgcgtagagaacttttgcaacggcggttacgtaaaagcattttcagttctagtctcatatattcgccgacttctccgtagcgttcgaagaatctatattccgagacgtgtttgatttgtgtatcatctactttggccaattctgcgtagataagtcccgacataagcttgcggttaaccagccacaaagtgactatcacaagtatagtgccgagaaagtagagaatatttccttggatatacccgtctcccaagtccataaagaaatagaaaagaggactgtcctcgggaataaaaaggaggcaggctattccaccataaaaaacaatgggcaatagaacccaccaaatacgttcgttgatgagtgtacggcacagcaagtaccagtaattgttagcaagaatcagcagtaagataccaataagataggtgataacaccgagaattccaaaatatttagtaatagtaatgaaagaaaaagggacaaacataaacaaccagaataggttgaataggctaagtccggagcggataagtaaaaagtcgatgacacgatttcgtttaaccggcaacaggaggtaaggttttacctcctgtgtcggtgttttttgtaacggaacacgcaacaggaaatccagtgccagaataaagatcagaacaacggcgttcattacatgatatggttctcggttgggaaccatatttgagaaaccgaacgcgaatgtcgtaccgaaaaatatcaggtaaccggcccaaaatgcagccatgacataaccgagtattttagcaactttgttcttttcatacatcgggtgtcttctggcggcaagtcttccgtgtttacgtagttcgttgagtatcatcatctatacaaaagaatttttatttgttttcttccggcatagtcataacgacttgaatttcgttgttctgtttcagcagcttggcaaggaagtcttgtacttctttggctgtaatgctgttgactaacttttcatagtctttcgtattgtcaatacctgtgtagaaatattcgtccagattatttagccaatagccgttttctttctgagcgtctttgtatttcttcaacatatattctttaatcttctgcatgtgttcggcagttggaccttctttagccattttctctaattgttccacaacgatagcagacagtttatctttcttagctgggtcagtctggaatacaatctgaagtaccagttcttccttcggatatttgctgaggtttccgttacagcttacgccatacgtgccaccttctttttcgcggatttcagcggtgtaaaccatatctaatgcctgatcaaggaagctgagtagtgtattgctacgcaggtcgtatttgcaagttccgctgtataggaacatgatggtagccattggcgtttcctgtttctttgcaaattcattcttgtattcccctttgcgaatgtacatcttattatccttgaatgtttccttgcggttgatagaaggcagagcacccagatattttgcaatcatcggtttcatctgttctaggtttacgtttcctaccagatagaaagtaaaatcgcttgcatctttatagcggtctttgtacatttcgaggatacggtcatagtcgatctgatctaccatgctttctttcagcttgatagcgcgtggatggtcaccgtataaagcacgtgtcactgtatcgctgaatgccgtcatcgggttagcgtctgagttttgaagctgtgctttcaggcggttcttgtatgattcgaatgcttcattatccttgcgcggagaagtgaatgtcaggtaagtcaactgcatcattgtctcgaaatctttcggagaacagctacctgaaattgtttctgttgtattaccgataccggctcctacggaagcacgtttaccggcaagggctttgcttaagtctactttgctgaaattaccgataccgcctaccagagctacaccgtttaattgagaaatattgatgatttcatcgttcgggaatacactggtaccaccaaggcttacacctttcatcatgatctggtcagctttgaaatctgtaggcttcacatagactgttacaccgttagaaagcactagttttgtgctgccgtaaacgtcatcagccttttcggaaacaatctttccgcctttaatgtcttcagagataagaggttcgttggaaactttgtcttcgtatggtttcaaatcgaatgaactcatctgcttcaataaagctgcaatttcctctttcgtcggatatttcagaccttctttttgaggacccgcgagcagtactacttggttattatcagtaaccagctgtttcatcaattcgttgacggccgtcacaggaatgtttggagccatctgctgtacaagcatatattcgaattcgatacccggaatcggttctttatcgaggaaattgctcacatattcatcgacatagttaccactttttgttttttcacgttcgttatacgcagactccatagcttgcatatagttagcacgcgcgcgttcatattcagtctcagtgaatccgaaacgacgtgcacgttctgcttcttccagaatagttttcatcgccaagtctacaccgtcaatcttgctgtttgcagtaaggctgaatgcttctttggtcttggcaaggaaatactctccatatcctgcacctgcaccggtaaaaggaggattggctgtttggcggagttcgttcaaacggctattcagcatattgatagccatgttgagtacgtactgtgtagcataataagaaatcgtgtttttcaaagaatccggcgttgcatcttgtttgaagaagatgttgatagaaggattggcaacttctttgtcagtgccgatatagatcaacggttcctgattgtctgctaccggatagtaaatacgttcggcagggtttaccggagcttttacgtctttgaatacctctttcaacttggcttccatttcttcggcgttgatgtcaccgacgataacgattccttgcaaatcgggacggtaccatttagcatagtaatcacggatatcctgataagggaagttgttgataacgtcaatactgccgataggcatacagtcggcatatttagaatccggatacatagtagcctgtgcatcagtcatgatgcgtagcataccactgttgcgacttctccattcttcgcggattacaccacgttctttgtcgatttctttgtcggcaaggttgatagcgctcgaccagtcgtgtaggataagcaggcaggaatctaccacattctggttttctgtcggtacgttactgatgttgtaaacggtctggtcgacactggtataggcattcaggtttgttccgaatttaatacctttagtttcacaccagggaatgattccaagtccggtttcatcgccggggaaatgtttggtcccgttgaaagccatgtgttccagaaagtgagccaagccacgttgctgtggttcttccagaatagaacctactttttgtgcgatgtagaattctacgcgtttttccgggagtgcattgtgtcggatgtaataagtaagtccgttatccagtttgccgatacggacatttttgtccacaggcatttgttgcatgggttgtgcaaaaacggactggaaattgcagcatatgataaggactgcaataaataatccacgtaataaatgtttcatgttctatttaatttaataaaagtttctgtgttatctgtcgtgattgtctatggtaaatcacaaacaggcagaaaaagagttatttaatggcttggcgtatccttactaattttgttaacaatccttccaataaatcaagcttcagcatattggcaccgtcgcttttggctacggcgggattttcgtgtgtttcgataaagataccgtctgcccctacggctatgcccgctttggcaatagtttctataagttgcggcataccgccggtcactccgcttgtttggttcggttgttgtagtgagtgagtgacatcgagcacgacaggatatccgaatgattgcatttcaggaatacctcggtagtccactacaaggtcttgataaccgaaagttgttccgcgttcggtcaacataacattcttgttgccggcttctattactttgtctgcggcaaattgcattgccattggagaaagaaattgtcccttcttgatattaacggtctttccggttttggctgcggctacgagcagatcggtttggcggctgaggaatgccggaatttgaagtatgtctacgtattcggctgccatgttagcttcgtcggcagcatggatgtccgttacggtagggattccgaaagtatcatgtacctttttcagtattttgagggctttttcatcaccgatacccatgaatgaatccagacgtgagcggttcgctttgcggtaagaacctttaaatacgtaaggaatttgcaatgtttcggtgattttgactactcgttcggcaatgcgcatggccatttcttcaccttctataacacatgggccggccagcagaaagaagttaccggcaggattgtttttaagttcgatcatattgttaattacaaattataagttacattatataggtaatacaggtatctccttgtttagaggaggcgtgtttgttttcttagttcgggataataagcgtggtcttttccgggagaacgcctacttccagaggaaagtgtttcggcagtatccgtccgtccagatctactgaagcactttgtgctcggagtactttcactttctttgtccgatagcacttcacgactttgtgattcagaatccttccctgtatcaacatccacaatccggaaatgatttgcaggaattccgggcgatagatcacagatacatccagccagccgttgtaaggaacggcactcggtgtctgtccccagccccaggcacttcccacacataccgtcatgatgcgtccacggatatgttcgtcgttgatgcggaggtgcattctgtacaacttacgttcgaatatcagagagaacaaggcggcaacatacgacaggaattttacgccccagaaacgctttgtctggtcggtaatcttgacgattcgtgcgcctagtccaatattaacagcgttgaggaagtaacggtgttgatgttcttttccatcgtagaagttgcaatagcctacgtctattttcttgagtcgatgattaatgatacagtcgacagctggcttgtattcggtactgagtccccaatatttggcaaagtcattcccgatgccgttcggaatcatgccaagtgcgatattgtctttatcctctgcatcggatagcataatgccgttgatagcgtcattcaacgcaccgtcaccgcccacaacgacaatcgtacgataaccattgttggctaaaatcttagcgagacgttctactgaaccgaaaccttcggattgcacatagtcatagtcgacgcctttgctgtccatgtattccttgatctctttccagcgtttttttacctttcgggtaccagctttcgggttgtaaatcacaccccatttcttcggttctacactcatatccgtatttctatcctacaatattaaaaatctcactatatttcactgccaaagatactaattcccctgcagtttttctttcacaaacgctatcttttcttccattggcagtttcgcgcttatccaatgaatagtaaatcctcgtctttccatgccgcgaaaccaagtcatctgccgtttggcgaattgatgaatcgcagtttctaatccgttaaacatctcttcgtatgtcatttgtcctgtgacatataacgtcaggtatttgtattccagaccataatatattaaatcttccggtgaaattccttctctgatcagttgtcgtacctcatcaaccataccttcatccaaccgctgttttaatcgtagcgtaattttctcgcggcgtagttctcgttcgatgtctacgccaatgatgaggctgttcagcttcggaaattcccgttcggggactgggtgggcggcataatattcttcaatctctattgcacgaatggcacgtttcactgtgtctacgtccgtagagttatgcaacgttttgtattggcttaaaatttccgtcagttcttcaagagaataacttgccaaacgggtacgcaactccggattttccggtacgggcattagtttataaccttttaagactgattccaaatacatccctgtccctccacataaaacggggagacaacctttttgtttgactgtttcgtaagaaaccagaaaatcttgttgatattcaaaaacattgtatttgtatccgggggcggctatatcaatcagatgatacgggattttatgtccattgaccgtataatcggccaaatcttttccggtgccgagatccattcccctgtatatttgacgggagtcggcactgataatttctgtattcaattcataggccaaagcagcggcaaacggagttttgcctgaggcggtaggtcctaatatggtgattaaatcatagttcggcatagttttattttttctacatctgcaaaattacgaaataattttcacctgcttggtattcagttgttttttttggttgaaatgctacattcatacctttactgcactttctttatccggtagctgtgtcgatcgttctatttcttcctgtctattacctccccttcattattgttatataaccttccgcttggtggaatataaagcaccgctttagagaacgtaaagcatagctttaggtagtctaaagcagtgctttataaaagtctaagtgtttgtttcaattataaggaagaaaaatatatgaggctttcaaaagtctgttttttacttttgcaatcaaggaataagggtgattttatgtattttacttttaaacggtaaattcccatgtcttaatattattaatgcgaatcagtatttggttcgcattaataatattaagacatgggaatttaccactctatggcaaattcttcgtcatcaatcagcgtattgatattgcgttgcatggtcatgcttccttcaactctgtaatgcgccgtgtatccctgagtttcccatggatctacaaatgtataattaagttctcttatcgtaacggttctgcgcatcagggcaggccgtgaggcatccatcatttcagaaatctcatacgttgcttgcttcttcgattcaaattcaatgtttggattttctgccctcaactctaccgtacctttcattttgtcatccgggtcctgattaaatgtcgcataaattttgaattttctacggtcggttcttttttcttttatagcacccgcatagaagaatatggtattttcgtcaaccacgtatgcttcacgagtgtcaactacaagtggtttgttggtatcttcgggaaaaacattcaaagccgtggttccatagtttcccgagaaatcattgaaaggagttatccatagtagagcgttgttgaaattttttcgtggatgagaggtataattataagaaggatcatcctttatgataaggggcaaaacccacttctccgacaaatcaagcccgttaaaattaaaattgatatccatcagagcctgacattctccggccggaatatgtatgtcataattcggaatagaataaaaattctcgggtaactgtttgtagtacaaatcttcccgttcatagtaatgttcatagttatagatgtcgagtgtatcgttatctatacctacatgtacatcaatgtctttattattcatcgtggaaccggccactataagaggaagacgatagggagaaggttgtccctttctatacttcaaacggatacgagatacggtagatgtaggagctttgaacgaaacatagtgttcatattgctcatctgaataaaattcgctgcaagaactcagcattacaagtaacgtaaccaaaagcaaagagatattttttttcttcataatcgttttttttaatagtaattacttttcactctgccaacccgggttttgagtcaatctcacatttttttccaactcggagcggtcgataggccaaaaataagttttctcggcaaaacaggtcaaaacatcagaaacaggaaccggtttatagaacaagtcgcgttctccttttgtcataaaaacattacatccgtacataggcagagattcttcatctttagcgtctttccaacgtctcaagtcaaaatagcgttgtccctcagccacaagttcaatctgacgttcgcgtttgatctttttacgaaacagttccttgttggcatactcttctgggctaaaatcaggtattccagcgcggattcttacaggctgcactcctttcttcagttcatccacatcacgtgaaatgctatgagtgccggagttgtcccaagtctcaatctggtatgaaccgtcaagttcattcaatgcttcggcatacatcaacaagatatcggcatatcttatcaggggatctgccttctttgagatatgagaaaattcaccatttatgttcttgtcatcattggtgtctgttggacgtacatacttcatcaatcctatgccggtttgaagccagtttaggctattggacataccttccgtctcgccccgataataccagcttctataaggacctctatcactgctctgtgttgcatttgtcaaccaccaagttactccgttgtatgctaccgatgcatagaatcggggttctcgattggcatattgaagcgatacattttcttctagaggtttataaagtcctttgctcacatcacttgcggtgacaaagccggtaactctttgtgaagaaccgtctccgcgacctatttcaatatctttgcccggaatatctttaccatctttcatataataggcatcacattgtttctgcgtcacacaagttgtattgtttcctttggctttactgaccggaagttgataaaagaccatatagtttactccataactgccctgattgtttcctcgtgtaaatatcaattcgggattttctactgttgacagttcaccattaaagactgaacggtatgattcaaacgggtctatgtctttatatccgttgggccaggattttgttgaaaaattgccgtcgtcatatggtggcagtgtaactggatacccgtcaaacccttcagtacgtttataggctacatacaaattataggctttaaggtcaatcacgtcttttgccgcagcagctgcccttgcccatttcttttcatcataggcagcagcaagaagtcggttgcctttgtcatccaccaacttttcggcatatccatcggtgttaccgttcattaacggactggctgcatataatagtgctttagcacgtacagccaaagcagcacctcttgtgggacgtgacacagacatcagttcgcgtttcaaaggaagatcctttgctgctaaggccatttctgaagcaatgtaatcggcacactcatcgtaagtgttgcgaggtattgaaagagcttcataactgtcagtgtaatcctggccctcttctggtacaatgggcacaggaccatatttctgtaatagtttccagtaataataagcacgcacaaagcgggcctgagctttatagtctgcccgttcctccgaggtcagttcattacacatatccacattctggataaagatagcggcttgacgtattccctgataactgtatttccatgtatacggccattgctcttcaccataagtcacttctttaaagcttttgtaaatgggattatatatatcatcactgaaattaaacggatttgagccggtgatactaatatcggcaaattcgctgtttgtcaagtaactgtatgcattggcaagccattgttccgtataggtttcatcggtaaagacttcttccagtgacattctgtccttggtatcggtattcacatcaagataattacacgaagccatactcaagcctgttgcaatcaataatatatttcttataagtttcatattcgtaagtgtttctttataaactaatattcagaccaaatgtaacagatttagtaatgggatagaagctaccgtcgttgcttcttggttctggatcccacaatttgaatttagagaaagtcaacaagttcgttccagtaaagaatagtcttattttactaaaacgtatcttgcttactatatttttgggtaaagtgtatcctatttctactgtcttaagacgaagataagaaccgtttctcaaccaatgtgtggaatactggttgttgttcacattattttctcctccaaatttaagtctcggatatacggcattcggattttcggttgccgggtcgcccgaaatatctcttgaaatccagcggcttgaattgacaacatccgtagatacatttccccaagttccgcggctgaaaggatgcaccaatacaccgttgatgaagaaagaagatttaccggttccttggaaatggacacttgcgtcaagccccttccaattggcagaaatacccataccataaacgaaactcggtctgttggtgtttcctacagccacgcggtcattattgtttatcactccatcaccgttcacatccttgtatttgatatctcccggttcaacgcttccccaagtattctgtgtaggactgtttcttatgtcgtcccagtccttgaacaatccgagagcaatcaatcctcttgactggcttacactgaaacctgtttcatacaaataaggatatagcttatggccttcatctttttcaagaatttcattatcactataagtagcattagctctgatggtaaggctcacgtttccgatgttctgattgaatgaaaagttaccgtcccaacctctgttaattacgcttcctacattagcataaggcttgtcaccatcataaagtcccacagtaagaggcaatgaacctcttgacatgaaaatgccggttcttttttcattgaaataatctacggtaagagaaaaacgttcgttgaacaatacgaggtccaaaccaatatcatgcttcttggctatttcccagcttataccgtttgatgccacacttgtataagtaagtccgttataactttggttaaagccaaaatcggcccattgatagttcttgaaacttccgatagtgtacatataagggaaacgtaccgatacattgtcattacctactttaccccaggaataacgtaccttaaacatattcagccatttgaaattattctgtataaacggttcttctgctatattccatgccatagagaaagctgggaaaaaaccaaactgattacctacagcaaagttttcggatcccgtataaccgaagttgaaattaacaaagtaacgatatttccagttataggtgaagcgtcctgagaatccctgatgacgaacgggaacactattcttcaaatcgtcacccagattataagtacgtatttttgaatcctgattatacttcaatacagaacctacatgatgatgtttgttgaaaacacggttataatgcaactctgcctcaaagaattcatgacggtcgccactacctcctgcactttgtgtcatcttttgctcctcattcagtcgcttgaagaccaaattaccttcactgtctctgaaacgttccgctttccatctttccggcgctttcaacttgtttatataattagagttgtttgtgtcgtagccaaaacgtccgataaacttcaatccttcggttatgaaatcgagtttctgatttaaggtcacgttggtctgtatttggttagtccagttttgtctgtaaccagtctgtgtagacgcaatccaaggattgtcacgataattttcgttatattctgatgccgggaaataaccgttcgaataaactttaggaatggacaccggagtctgtcccataaggctgttccacacaagcgacgaacctcgtccggtatcatttacctttttcaacattccggatatgccgacatttaataaagtagatttagtaatgtctatatccgcattcattcgatagttccatctgcgggcattggcattggtattatattgcttttcaatttctttatccgttttatacataccttcttcttccacatagctggcagatacaaaataacgtgtgtttgtactaccaccggtgatgttgagtgaagccttgtatgtcatggctcctttcttcaaaatctcatccatccagtctacgttaggcagtaaatcagggtcgagtccgttcttcaatatatacagttcatcaggctgataaaccggttcttcgtttcttgtgattcttgcctcatttatcaaagatgcgtaagtgggtccatctataaattccggtgttatggttctggtattataagaagtttccgccttggcagatatggtaatcttactgggtttaccatgtttggtagttatcaataccacaccgtttgcaccacgggcaccataaatggcggtttctgaagcatctttcaatacttgaaacgattcaatatcttcaatactgatatcatccatatctctttcaaaaccatcgacaagtacaagggcacttgttttggcaccaaaagtagaaataccacggatccagaattcggaagtattttggcccggtgctccactgctctgcatggataatacaccgggaacatttcctgccaaggcattaacaagatttcctgaaggagaaacattcagatgtgctatattagcagaagaaacagctcctgtaacggttatctttttctgttctcctgttccggtaatcacaacttcatccaatacactagattttgactcttgcattatcacagtcagtgttttcttatcttttataagtatctcctgactctcaaaaccaatgtatgaaacgataagacgttgatataactccacctttatcttgaattttccgtcaatattggttatcacaccaagtccaggcacattctttactacaatattagcacctataagaggatctttatttgaatcgagtacaatacctgatacttctatttcttttacgtctgcatgattttgtgccgttgcctgaaacatcagcataaacatacaaaagaaaataataataatgtttttcattcgaggtaacattttaatattaaaaatttattcatctttcgctatatttctaattctatagttttcgatatcaccaatgtaaaatatcttatttacttcatcgtagtgtattccgaaaggataattaaagcgcgcctcttgccttaaatcaccatctacataaccattagggttattgttaaccccctgactgccacgaccggcgtatgtgtgtacaaatccttcgggagttacataacgaatacagtgtatcgaagagtctgtgaaataaaaatcgtaaatatcatctttgccctcttttatatattgctcgttttttatgaatacgccttgtgccggattacctaacttggcatttgttccttgaccgtcaagccatccttcctgtttttgttgaccacataatatactggcggttaaaagcgtcttgttcttccagtcatagggtattttcaatattgtcttccattgggagaatgagatataagcgtaattgcccgacggatgcataaagataaaaaacatcggttcgccatctcctaaggcatataaaaccttttcttcttttgtttgcatatcaaaacggataagttctccggtctttctctttacataatataactccccgttgggatgtaccgcaacagaaacgatttttcttccgataacaagaggttgtggtttcttaaaaccgtttgctctggtagtataagaaatacctatggcattttcagtatcctgctgatttgtaatcaacatagtgtcaccgcttaaagtgaaatctatggtacgaatactttcccagttaccctgtcctttggtcaataatgttgagacttccttcttttttaaatccagtactctgatacttgtcccgccatacctgtttccatcgaccacataaagtacgtttgggtctttcgggtcaacagtcatatatcccggaccggaaaagccggcctctttaaatgaaccatcctgaacctttactttaccggtttcatccacatagccggctacggttccgacaatcgttttggaaacataattgaatttctctgccgcagtaatggggtcttgcccttttatgcttacttcaatagttccttctgaggctttgaaaggaaccatacaatatataatatttccattactacctataaccttggctggtaaaccgccgatttttacctttatatcatctgtattacttccaaagttatttccttggatatacaatcttgtgcgagctcctccttccgtaggttcaaaacctgtaatttgaaccggttttgaaggatcgtgaattgtactagttgtagtagtttcatctttacaaccaataatcaataaagaaattaggaaaaaaattaatgtatttctcataaagtttaaatattacatgagttcgtgataatttcaaaatagaataagccgatttttcaggttaaaaggtctgatttcggataatgcgctcgaatctctgattctgaccgaaaacatgcaacaggatattgcaaatgctgtaaaagattttttcttacttaaaataaatgttttctgtttcatataacttgaatttaagattaaatattaaataatggaatgaaagttttttctctgttttatatattacttcaatactcaactttatagtcttttctgcttggtttaccgctccagatcttgcaagaagtccattcttcaaaactatttgtccaaaagtaatcatctgccggaagtcccagtgctaaaaaaccaagtgttgccatatacaaactaccggtagtagtataataatcagccaattcaggttgatgaccattaaatcccagtaccaaccagccgtttttgtcgaaattctgattaccgtcgtacatattcacaaatacggcagtgagcgcacaacgtacttgtgcaggatgtatataagaaggcagtattttcatcaatgctacttgtgataagctttgaaatgcccctgtacgataagtagccgaacgtccaaaagccggaaaaactccgtcaggcattatcatacgctcagaaaaatcagaatggcgtatcatccttttaacagctgtattatattgcctttccgagactatttttttttcctttaatacctgataaatgtctaccagcatgggatgaataacataatcattataataatccatagagaaacttggtccgtcactataccagccgtcacccacataccattcttctatttttttacaagctaagaatactttagcttgatcaacttgttcaccgactttcaacaaaaaagtttctatgatagccgcaaataacaaatgattattatacacgggtttatttctacggagtgacttaaatgcggtcacatatctttgtttggtgagcgtatccagtggctcccataaagccttgggggcacgtagaaaagcttgtgctaaataagctgcatctacagtgggctgataattgcgggtaaagttcagacaatcgggagattcgggagaaacaccatttttcagtcctttaagtactgaagttctaaaacttttccttagtttacactcttctgtattgtcatcaggtaaagccaaccaaggagcaatgccggcaagtgttcttcctacagcctctaagtaggtaacgtcacgtggattaccatagaaattttttccggtctctacgggcatgttggcctccaatgttcccttggctaaattgtcaataaccggtgaggctatacgacacaaatactttacccataactcgcggtcttgcgcacctgtacgctttgaagctaccatagagctgaaggaacaaatgcaaaatagtataaaaagaattttacgcttcataattataatatcggtttattgtttatcattcgattgtaacgtaaaagagcctctaaaaaataatagtccgcataaattaatggcacgtctacttctgaaccgtgaggaatagctcctgtgctgtgttttaaaataaagtttccgtttttaccttcttctgcacgatattcaggactcgataatgaggtgagtatttgtagtgctgtctctgtataaattttcttcttgtcatcctttacataagaggataattctaacaaagcagaagcggtaacagaagcagcggaggcgtcacgatagttttgtatgtatttattggtcttagagaacttgccagggataaaccccggtctatgcgtatcaaaatcccaccaaggaattttatcagacggaagattcgggtgattgatgtaataatccgccatacgctgggctgttttcaagaaacgcggatcctttgtttcacgataacataatgtaaagccatatattccccaaccttgtccgcgagaccacgtagactcgttggagtatccctgtgatgtttcgcctttaatgaaattcccggtctcagggtcatagcatgccagatgataactgctaccgtcttttcttatctgatatttcatggtcttttccgcatgcgatatcgctatgtttctgaatgaagggtcaccggttgcttttgaagcccagaacagcaattccaagttcatcatattatctatgataacgggatatttaaaaacgtgtttgttttcccatgaacgccatgagtcccaggacttgattgtacctacttgaggattaaagcgtgtagccaaagagtatgcggattgtataagtatatccttgtatttttcattctgcgtaaggcgataagcattaccgaagctacaatacatcatgaaacctatatcatgattacctttgaatgttttaactggttcaagcttttctgtccatttcttggcaaagctttcaaaagctttatcacctgtatattcgtttatataccataatattccaggaaagaatccggaggtccaccaatagatgctccgacatgaagtatttcctttaccgtttatggagtgcggcattttagcttctccttgcggtatattttcaagcatgtgtaccatttgccttttggcaaaatcaaagttatcacttactaatttgtttccgttattctgtgccaaggcattacttgaacatactaaaactgtgatagcccccaataatagcagcttatttgttttaaataaggaaaaatgtctctgtactttattcttcataatttggtaaatatagatttagttataatggctaaaacgattctttgcgaaggcaaaaatagaaatagcgttttctataactgtaccaaaatgtccgaacaaagtatccaaaaaatatgagtgcctattttaacgttctatgaattagaacgttttagactatccctggtcttgtttcctatattgtagcggagaaattccaaaatgattcttaaagcatttacaaaaatagcgtcctgaactaaagcccaaatatgcagcaatatcatccatgcgaagtgtcgggttctttatcagtaatgcagtagctttattaagtctacattccaaaatgaaattggcaggggttgtacctgtaatgtcttttatcttttcaaaaaaagcactacgtcccatacatacctctgatgcaagttgctctatattaaaatcaggattctcgatatttttctctactatctcttttattttatcaagtagttttttgtcactttcattttgaaccactcctggaacatttgtagactggctgttatcaatatttgtatgatgaagcaactctctattacggagtatgttattaattttaatcagaagaattttagcattaaaagatttggtaatataatcatctgcccccgacattaatccctccacttgttgttcgggagatattcttgcggttagcagaactaccggaatgtgacatgtgtgtatattattctttattcttctacacatttcatttccacttataccgggcatcattacatcgcttaatacaatatccggttgttcctttattgtaattctcaagccatcgtccccatttgttgctttgtatacctgataaagtggagaaaatatctccgcaagcaaattcaggagttctacattatcttcaacaataagtattcgtctgacatcggcttcatcaggatcatttttatgatagactatcttattattctcttttagtgttttcataaaatcactgtccggtattgaattctgcacaatagacttgctttcttttatatcatgctgtatgtctacaagcgggtcatttataaaatgttcattaccggttttcagcatgacgctgaatatgctgccatagccgggtttgctttccactgtaattttaccatgatgcagattgataatctccttacataaagctagtcctatgcctgaactgaatgtgtagaatttacctttagattgataataacgttcaaatatcctatcaatctctcctgcttcgattcctatgccattatctattaatcgtatgataaacatttcattgtttttaatcaaagaaagttcaacgcttccattgtcgttggtaaactttaaggcattagaaatcagattcgagaacacttttcttaattgtacactgtcaaaccagcaaaacgccgattcgcagcttgttgtaaacaggtatttgatgttatgtgcttctgcctgttctttaaatgacaaatacacttcatctaagaaaggaataagatttttttcttgaacagataaacgcatttgtttttgatctagcttatgaaaatcaagtaattcgctaatctggttccgcatatcagatgcatgtttgtgtaattttaatattttatcataaacaggtttggaaatatccttgctgttactcaagagtagttcaatctgagtagttattaaagtaagcggagtacgaagttcatggcttacatttgtaaaaaagtcaagtttgaaccgattgattttctctatattttctttttctcttttttcattatccaataagagtttaaatttgaaagatgttatcttttcctttgctataatgaatagtattgataaaactattataaaataaatcaaccatgcccaccaagtgttccaccaaggtaattttacaacaatatcgagacttattccttcgtcctgttcattaccataaatattgttttctctgatatgcaacgtataattgccaggaggaatattggtataggtgatatgatgtccattagtttttatccattttttatccaatccgtctaatttatattcataaaatgtcggaaatatagaataataaaaatcgttgtccgagaaagtaaattccagattgttctgattgtgtttcaatacaattttatctgtatatgaaataatacgcttcagaattttgttactgtcattgggtaacattaatgcgttatttacaaataattttgaaagatacaaggactttttgttagctgaattctttaaattatccacagaaaatgcagccagcccctccaaactgcccgcatatatatccttattttcggaaacgtaaagtccgttatctacaccaaacgatgaaactggcagttttttccccgatatagaatatttcactctcttttcttttgtatcgaaaaaagaaagtccgttactacacataattatcataaatctttcatcgagagaaatacaattaaagcaataatcatccaatattagggaattcttggaattatatatttgaaaagtatcttctttagcattatatcctaacattccaccaccttccgtacctacataaatctcaccgttacttgtttcacatatacataagagtacattgtgctttatgccaaaatcactcgattggtatcgtttcattgaatctggcacacctattttcatacaaactatatttttattatatatcgcccatatctggtctgattgatcgataacaaacgcaagtactcccttaatacataatagcggggtaacttcgttggttttttcattaaacacataaataccatcacttgaagaaaatacaattttatcgccatacatatatacatgtgtcacagtgtgatgtaacattctatcctttggagacttaaaacacttggtgaattttccggaaggtatgtcataagctatcaatcccgataaataggtaccaatatataatttatccttattcttatcataacagatagatttcatattatctgctacaagaccggagtctttcgtactgaggtgacggaatatttcagtcttatgattcatataattaagtcctccgccatctgtacatatccacaaatcatcccgtttgtcttttacaattccactgacaaatggaaaattgagacaatcagagcgttccttgtttgcgggatagtatttaaaaattctactctctggggaaaagacactgacccctccataataagtgccgacccataatcctccctccttgtccaaatagagggcgaatatggatgaatgtttcatgtcaccggaaaaacctcctgaggcataggactctatattaccggttgagatagagtatttgttcagtccttcacgagttccgatccataaattaccggactggtcttcggttaccacccttacgtcattgctgcaaagactattcgctgttccgggattattgacaatatggtttacacaaatatcattgtcaaactgatacagcccgtttgaacgagttgccatccaaatagaaccatctttactttcataaagcatttcgatggaaggtatgtccaatatacatttccataatccatttttatattctttgtaacatccttttgacgtgacgatataccattcactacttctattgcaaaatatagaacttattcttcctgaagagatttctatttttttgaagaaatcccaacgattatcgccttcattccattccaaaattgaatctttagcagctatataaattttgccaccaatagaattaacagcgtttatatctctttctctgatacactgaaaacggtcttcagtcaatttataacaaaccaaagaattgtcagcacgcaaaaatatattgtgatttgaatcttcaacgattcgataaattgtattatttttaatatagttgtcaaaacgttcttcacctcctttcaaggttatcatttcatttccgtcatagatactcaaaccttgcaatgttccgaaccacatccttcccaattcatcctgatgaatacttagtattgaaggttgcgagagtccgtcttttactcctatatttttaaaataatatccgtataaaggaaaatgtatgaagtttatgcacaaaaacaaaataatacgaataagacttttttcatataagccggatttctgtttcttcatgattgattagactttatgaggttcacgcaattaaataaattgcgtatacaaatatcctatttaatttagaaatatcaaaaaaatatatgtcttttgaggatataggaatagattttcatttatttattgtctgcgttagcctgtatactttcccgttttcatctataccctcaataataatgtcctccggtgcggtgctgtctggagtgtaatattctattattgcatttccttcttcatccaattgcagtgccggattccaatagatagtactccttaaatctgaacgccgggcatctttcttttcgggagtatcataggttgggtgataaaattccaccgagtcactgtacccgagtggagagtaagtgatgattccttgtgccggtctggccggaagatctcttccgtcttttaatgtgataacaatggcaccggcagcaccacgggaacctaatattgccgcatctgctccgcggagcagacttaaactggacatatcactggcttgcagggtggtcaggatctcattgtcatcctcgtacactacatcgtcaatcacaataacaggctgttgcggattgttgcgtatatgtatttcgtttccattcattacgctaactcccggcagtctcattactgcatcaaaggctgtatgtgcaccgtatttttccagttgctctccttcgacagtataggtgttgattcctcctgtataaatacttgttgaactgggctttttccggtttcctgtaatcagtacttctttcagattgtagactctcatgccgccttccatgtaatattggtcgcgggtattgagcaaatagtcttccataaaggttgctgctccgtcacggaaaggggatttatggaaggcaaccggatactcaggtttttctatttcaatatcaactccggcaaaacctctctttgtacgtgcttgtatgaggaaagtggtactgtctctgaatgaggtattgactataaattctcctttctcgtctgtggttgttgtggcgataatgttttgtttaggagctaataatacgataggtcctttttttacattccctccgaagaaacctttaatacgcccactgatagtctgtcctttctcaatataattagtgaagttcaatgagggagcacgcagtacattatcaaatttgtatctgcgccagccatgtgtcatcatcaagaaatctaacgagcgtagggttcgtgcatcttggcggagaaaatagaaccccgggtcttccacatatcctttcagatcggaagtcaacagtaggtttgatacaatgttgtcagcgagagaatccggttggatacttttccggttggtaatgctgacggagaaactaccgtttacaggatttcccttgtcgtcttttattgaaatatttaatgatactttttctcttttttcgtatgtcggtcggtccggagttatttgccattggggagttttgcggtcgggaacaaagactagccgttcgctgagcgcattcccttgctggtcgattaacatgaaatgagtgatcccttctgtaaacaggctgtcattcatttttccgaaagtccttgtcggattaataggttgaagtatggaaagttttccacgggtgtgagcaatgagaaatagcttttgaggccattctgttgcctctgttttctgaatctcataacgtatttcctgtttatagtgacttatggaaagtgtgattcccttttgttcgatagccgggaggtcaaatcgtttggtaactccatcgctggacgtagccattacgtaataggaactgccgttggaagggtttaatgtgaaaatccccattcctttgtgctcggaatgaaaagatgtcagtgtatctccttgggagtccagtaagaaaccttctatttctttggagaatccgtctgctccctgagctttgaacgctatgttctggtgctgaacagcaagtagtgcgcctccttccgggaaaaaagtgacgtcaaagtcattcgtaaatgccggcaaataaaaagtctttttatagatgtattgcgggtcgtcaaattccacttcaatgctgcgggcagcagttggcttcaaatccggtaaggaaatggaaatcagtccgttttcatctgtcttttttctccctttatcttttatttttccgtttacgataaaccgataccggattgctgtgttcttaaaaacctcttgggtattgctggtaaacttgacttttgctgtataatgggtatcgtcctcttgttgatatttgatgtttgaaaggatggtgttatctatggagtttccgattttcagattacgtgaatagaagaattccggtccttcattcaacatccagttactgtatcctcgcaggtagtaatcaccggcggggagggtaggaggcagggtaaaagcattgtggaaacctaaagagtctctacggattttttttcgttctacgatcgagtcggaacgattgattaattctgtaatgataaagttactctggctatcatcttggtgggtaatggcatttatcaggtagcctttgaaccagattttctctccggcaccgtaaaatggtttgtccaggtggagataaaccttctcatggggtattttctctaacaggctaaaattggcaataaccgtatcttgcatactttgtgctgatagcattgaagttgataataacattcctgttatcagagctatttgacatatttgtgtcagtaaggtagttttgcttttcatacgatatataatgttagagtgttaacttttgtgcatccagatagaaagtacttttcgtttgactgcgagtatattaatgattgatacgataaggaacagaagaatacccatgccgatagctgcccatagtgaacctgtttccaattgggggaatagcaggcggatactttctatgtaatagctacgcagccaggttactaatccgatagatagcagtaatacaacgatgttcaaccctactgtgagtatctgataaggcaatgctactctattggggctgtatcctattaataaaagactttccagcttggtcgtatttttttgtagtagtaagaagatgcttaacatcaggatatagaatgaaaggatactgataaataggccgactcccagcacaatacctacaatcaggcgaaggaaataggtagtcttgcctgcatccaactttccgtcttccgtttcatatcctttcttttgaaaataaccggcaatggaggaatccgcaggattgctgacttcaataatcagtcgtgccggttgtgcttccgcattcggggcaaagttcttgttggcccattccataaaagactgggggaccaaaatggtgttcagtcgattggagaaaccgacgatatttcctttatactgctctacccgaccatttccgcgcatcatgatgtccatttggatcagactcattaagccttccgatagcttgggcaggctacggctttgggcaaagccgaagttataaagattcaggtaattgcggggaataatgataggaatggtgtgtgtggcttcatcaaagtgccatttatcgagtttaatatcaacaaattcatcgggaaccgattcgaaaaacatatcggtggaaagatgaataccagtttcctgcatacccagtcccgtcgaaactttgaattgggagggggtaaaagctccgattgtcttggtaaacgattgtttcttcaggtcggcgatgtcttcggcagagaatgtgttgttttttcctgcaaaagagccgagcgtgctaatcttctttgtggctatgatgaaatctttcttcataaagctgtctccttcggtgaataccggaatgatatctttataaaactgtacactaagcaatacaatcatcataccgaatagattggctaaaaagaaaccggctaactggccgatactgatatgttggcggagaagtttccagacaagggctgacattttatttatgatttaccttaattccgcaacactattacaaatataactttttaagtacctgagcaacaaaaagttgctcaggaatttgccatgtcagatttttcacctatcttagtgttgcaaatcaaaatatgtatcaaacccgacagacatggcaaaggtagcaattaaatccgagaaactcactccttttggaggaatattttcaataatggagcaatttgactccagactctcatctgtaatcgactcaaccctcggtatgagatgcaggctgtatggttatcaatacagcgaaatcatccgttcgcttatgagcgtttatttttgtggcggctcatgcatcgaggatgtcaccactcatctgatgtaccacctttcgcttcatccgacacttcgcacatgcagtgccgacacgattcttagagccataaaggaactgacccaggataacatttcctacacatccgacactggcaagacctacgacttcaacacggcagacaagctgaatacactgctcctcaattgcctattgtccacagggcagctgaaagagggcgaggggtatgacgttgacttcgaccaccagttcatagaggctgagaagtttgatgcgaagcctacatacaagaagttccttggttatcgccctggcgtggcggttattggcaacttgattgtcggcattgagaacagcgacggcaacacaaatgtccgtttccaccagaaggacacgctgaagaggttctttgaaaggtttgaacaaaacaagcttattatcaaccgtttcagagctgattgcggctcgtgttctgaagagatagtggaagagattgctaaacactgcaagaccttctatatccgtgctaaccgatgcagttcgctctacaatgacatctttgccctcagaggttggaagaaagtggaattgggcggcattgagtttgagctggcctccattctcatcgagaaatggaaagggaaggcataccgtcttgtgattcaaagacagaagcggatagacggcgaactcgacctgtgggaaggagaatacacctaccgctgcatccttacaaatgactacgagtcttccgagaaagagattgtcgaattctataacctccgtggagggaaggaacgcatcttcgatgatatgaataacggattcggctggaacaggcttccaaaatcctttatgggagaaaacacggtgtttcttctgcttatggcactcatacgcaacttctataaattcatcatggcgaggcttgacgtgaagaggttcggactcaaagcaacaagccgcatcaagacgtttgtctttaagttcatctctgtgccagccaaatgggtcaggacatcaaggaagtatgtgctgaatatctattcatgcaacaatgcttatgccaatgtgttccagaatgactttggataacaccgacaacttatagtcgtgattttgcgtattgcctcaagtcgcatggtggggtaaggggcatttatatgtctttatggtgacattcgatgcactgtgccccctttttactaacgatgcagattcttttcgcttctgtatcatattaggcgcgtagttgcggatttgaggatttacaaattataatttacaataactcattactcgccacttatcatagctggagtatgcgttgataaggcaactcaatatgttttcctatggaagtggcgattactccggcttgttgcttttcagcttcgccaataataagttctcccatgatgcggctgttgtcatcatccagatgactgataggttcatccagaaaaaggaaatcgaaaggctggcagagtgctcggataaaggcaacccgttgttgctgcccgaacgagagtttaccggcctttacattcagcttgtccgaaagtcccagtttctcgaagaaggctaggatttctttcttctttttgtatccggtaagattatttttcagttgtacattttcaagagcagtcagctcggtgaagatacgtaaatcttgaaaaagcatactcagtgaatgctttctcaggtctacccattgcttcacagaatatgctttgatattagtctcatcgaaattgataatcccctgatagtcgttgcgatagccataaatatagctgcacaatgaagattttccggtgccggaagccgcttctatcagacacatttcccctttccggaagataagatcctgatgccatatatccgaagtcaccgaattacggtcagcaaacacttggggaagtgtttgctgtaaatgaatgctattcatgccgtttgtttacgaattacataccggtaaattgtttgccgaagtcaacgattaatttgagcgcattgacgtctttatctttcaggcaaaggtcgatttcgcttgtttctccttctgaactaacggacagataggaaacttttgataacatctcagaaccggtccggaacttttcaccaccaaatccgatcagcattttaacaacgggaagttcaagtatagcttctgcgttgatagccatgaatacggtttttcccttcatttccgatgcatacggagcgtctttgatagacttgtctgccactttttctatatttttgtagagtaactcgtcattggtggcatacatttgtttgtctttgataccaaagaatacgttcattcctttactcttatagacatattcgtttttgcccagttccagaatatcttctccttttttcagtcccaatacctgcttgttcttataaagggcttcgagtgcattgccgttttttacgtctgcatacactataaaggtaggagcgctgttcatggttacgttgattaaccctgcggagatatcaccgttgaaggaactgaacaattctttaacttcatctgctttggagatagatactgtgttacggaattccttattttcacttaggagattataaagaccttctccttttatacccagattgacaaacatcagggtagaagccgggaagtattttacgaacgtattgtttgcttttccaaatgcttccaactgttttttcatcaaagcttttacagcctcgttctccgtgtaattttctgttttcaaggcaattcttcctttttcaaagtttaatccggctattatggttatgtcttctgctttcacttcagcgggaagtcccatactgacttgctcttgataaggtgcaggaatagctgccatggaagcgaagaaattgatgtcacttttttgtttttccattttctggaaagcgccggatttcgcaatgctgttatctgcggtttgtttcaacagattggtgatgccttctttggctttttctatttgagatgttccttttacggaaatgagcattacggcagaattgttgaaagcgactaaacctccgttcatggttgtaaagctatatccagctgcttcgttgattggttggcagatttgctcttttaccattatttccaaggaagcgtgcaggtcatcttcgcttttgattttcgcaactgcggtagagtatggaaaagagggcgaagtaaatacgtagacaggagcttctacgtcaattcccgattcactggggttattcatcactttttctaattgttggaaagtggcagcgttcattccactttttaatgcttccaatactttttgcttggcagcttcattctctttatcattcaatccggccttactagccaaggattttagatttatagaggtaacaaccgtagcatcagccggtattatattggtatattccactgttttggaacatgctgccaggaaaacaatcagtactgcaagtaccgagagtcgtgaaatcattttctttgccatactcatattttttaatggtgtataaatttcaatttaactgttcttttattgttgatttagcagattcaacgtgtggcaagccaccaatgccgctgtttctgtccgaagtcgtgatttacccaggctgatcggcgtgaatccccgttcaatagctttttctacttcgccctcactgaaatctccttccgggccgatcagcaccaaggcgtcttctccggcttttagtacgtccttcagcagaggtttctcaccttcgtagcagtgagcgataaacttctgtcccttaaactcctgattgatgaatttattgaaatctgtcatctcattcagtttcggcagacgggctttgagtgattgtttgattgccgagataagaatcttttcgatccgttcgttcttgataactttacgttccgagaaccggcagttgagaaatgtcagttcgtcgaatcctatttcagtggctttctcggcaaaccattcattacggtccatatttttagttggtgccatggcgatgtgcaggtggcacggccatagtggtttttggaaaattgtctctttgatagctaccagacaacgtttgttggttgctgccgtaatttctgccttgtagaaactaccctttccatcggtaagggtgatttcgtctccgatacttaaccgcaagacacgggtacagtgctgtgcttcttcttccggaagctcattggttttctgtatatcgggagtataaaaaacgtgcatatagtaattattgatttttatttctttgattgatctggtcgcgtattttagcggccaattcatagttctcgtctttaatagcctgctccaatgcttgttcaagtgttttggaagtggcactgcgcgatgacgattcatgttcttcttccatagattccttgtcaccaactgtttcttcagaacggttcctttcttcatccggtatgcgcaggcattcccggtcgaggatagattcataaatcagaatcgggcagtcggcacgtaccgccaatgcaatggcgtccgatgtacgtgcgtcaatacgtataatatcttcgtctcttttcaggtaaacataagagtagaaaataccgtctttagctttgtaaatcagcacacgtatcaggcttacccccaatacggtaaggcttgtggtgaataaatcgtgtgttaacgggcgtggagttttaattcctttcagatacaacgcggtagcctgggcttcggcgggaccgatgatgataggcagttgccgttcaccgtccacttcacccaatagcattgcgaatgcacctacctgcgcttggctatttgtgatatttaaaacttgtaattctacctttttatccattgttttttacttaatttgttttactctcccgtcggtgcttatacttgaataccaaggcaaacagaattccgataaccaacgcatacgcagcaaaaatcagccagatatccgtccattcccgactcaccaatttgccgtcggcatataccgagaaagcatctaccacagctccgctggcatatcctccgatgatagctcccagaccgttagtcatcataaagaacaacccttgagcactggcacgaatggaggaattagtctcttgttcaacaaacaaggaaccggaaatgttgaagaaatcaaacgccatgccataaacaatcatggaaagaatcaacatccacaatccgcctcccggatctccgaagccgaacaaaccgaaccggaatacccatgcaaacatactgattaacatcacttgcttgatgccgaaatgcttcaggaaaaacggtatagcaagaataaacagtgtctcggacatctgtgatatggatagcaggataaccgaatgtttcaccccgaaagaatctgcaaactccggaataccggcaaaactgcctagaaacaggtcaccgtatgtattggttatctgtaaagccgcccccaaaagcatggagaaaaggaagaaaattgccattttctttcttttaaataacaccaatgcatccagcccgaaagccgaaagcagtgatttgttttctgttttggcgggtttacaagccggaagggtgaaagaataaactcccagtaacagtgcggatatggcgccgacataaagttgggcgcttgagtttttgaatccggtaaggtctaccgcccacatggcacagataaaaccgatcgttccccatacgcggataggggggaaatctttgattaaatcacatttatattgctccaatgcattgtatgaaacggtattggctaatgacaaagtaggcatatataccaatagattgagtaacatggcccaatacatctggtcgtatcccgtagcggtggaagcgtagaaaagacaggctgcacctacaatgtggcaaagtccgtataaacgctctgcattaaaccatttatcggcaatgataccgataatgccgggcatcaccaaagaggcaattcccatagtggcgaaaatggctccgatttgtcctccttcgaaatggagttctctgcccatatagccacctagtgaaattaaccatgacccccagacaaaaaattgcaggaagttcataataatcaaacgaacttttatgctcatgacttttttaaatttgtgtttctcttttgctaataatagatgcaaatataatattttcgttgattgggtgagcaagttaattgataaaaaggcgataaaaaaggcataaatgcaaagaaggaagaatatctatgataaaaaataagaatggaaagggtatataaaaaaagaaggctatctatcccagacagccaatctttgttaaccttaaatctaataccatgaaaaacacagtgcaaagataagtggtttatgttatacaacataatgtttcatcgaaaaactgcatattgttaactctaattaactttgaatactccttttttctgttactgcctcctgatttcctcttataatattcttttttatccttcgaatagaaatctggttccgacatcttgccggacttattctacgtagagtacaagtcctttcagatattcgccttccggatgatagatattcaccggatgatcggcaggttgggtgagctggtgcaagatacgcacgctgcgtcccgacatggcggctgcggtgaatactgctgtgcggaaattatctttggttactacctgtgagcaggagaaagtaaacaagataccacccggcttgattttctcgaatgctttggcgttcagtttccgataaccctgcaatgcgttccgcaacgcatccttgtgtttggcaaatgcgggtgggtcgaggataatcaggtcatactggtcgcccatacggtcgaggtatttgaaggcgtcttcagcgaatgcttcatggcggggatcaccagggaagttcagttccacattcttgttagtcaggtcgattgctttcgcagagctgtctaccgagtggacgagctttgcacctccgcgcatggcgtagaaagaaaagcctccggtgtagcagaacatattcagtaccgagcgatctttggcataccgttccaataacgagcggttttcgcgttggtctacaaagaatcccgttttctggcctttcagccagtctacatgaaacttcagaccgtactcttgtgcaatattatcattgcttcctcctttcaggaaaccattttcggggaaaaggtcggctttgaaggggagcgttgtttctgatttataatagatattttcaatcttgtcacccatgacttcggacaaagcctcggcgatcaccatgcggtctacgtgcattcctgccgagtgagcttgcatgacggcagttttggcataaatatcaatcaccagtccggggagattgtcaccttcaccgtgtacgagacgataggtgtcattgaccggattgatagcgattccaatggcacaacgcatgtcgtatgcaatttccagtttgcgtttccagaaatcatggttgatcggttcttgccggaaagaaagcacacgtacagcgatacttccgatctggaagtgtccttcggcgataaattctttcttggaggtgtatacttctacaacttcaccttcttcgggttctccgtcgaaacgggagatagcaccggagaaaatccaggggtgaaatcttttcagcgactcttctttaccgggtttgaggtatactttatgcatagtgttttatttatctgattctattaaatgttcttctttcttttcttcgggagctatttcataattacctgtccgctttagttcttgcagcaggttgtagatgttgaggcatgcccaggcgtcggtggcggcgtattgtttttgtccatcactcaacacatccgcttcccaattggacagtcgttgcgatttggaaattttttccttaaataaaatggcataaatcttttggaggcttttgtcctgtatgccgaactgacgtacatagtcctgcaattcgatacaactctgttggttgaaaggagcacgtttatgcaacatcataaagtcgtctttcagcgaaagccccaccttaataattcccgggttctcaagcaagtcaaccaatggctgtgtaagtcccgtcatattgagccggaacagaaaacaacattcttcggaagaaatctggagaagcgctactttgtgtgattgcccttttgtgaaagagggccgcgtttcgctgtcgatacccaatatcggctgcgacaacaggtaggctaccgccttttccgtttccgattccgattggataacatggattcttcccggaaaaactactttcgggagttcctttaattcgtctttatcaatggttcttcttacaatcatttttatttttcatcatcgtgacaatggcaactgccttcgtggcagtgacattcgtcgtcatggcaatgacaaccgccttcttcacaacaactgtcgtcttcgcttggttcgtaaaatccttcttcgttgttttcttcctcttcttcgttgtcctgcagattatacttcacgtcgtggagggcgcgcagtgtattaaccagcttttgtccccacaacattccgaagttttcctgacaaatggccagcgaatcgttcatcgtttcgttcaatcccagttggaaaacaaaaataaagtctttgatatcttgataaatatcagccaaatcttcagatatggacttcttgataggctggtcgctgtataccatatcctgcacaaatacgtccagataatcatccttgtctcccattaatcctgcaaggttgatacgaagaatttcataaatttcttcagtcacatacgtctcgggtgcctcatccccgatcgtctcacacttcggcagcatggaggctttgagatagagtaaaggcagtattttcaatgatgtatcaacgaaagtgctgcgcttcatgctttcggcacgttcgaggaatgcacaaaattcggcggctaccgttacgaactcaattacattcttatcaaatatcgtttggctttctttttccataatcagcgttgatttgaaacgcaaaggtaagaaaaaggattgaatgagcgtagcgctcgttatttttttattatttttgcggcttagattacgattccaattttataaaaagaataaaagactcatggcaaaaaaaaaattagataaggaggccgaacgtacttcctcttctccgggtaaaatcgcagcaattttaaagaatgagactgtccactttgttatcggattaatgttggtcattttttccgtttatttattgttggctttttcctctttctttttcacgggagctgccgaccagagtattatcgacagtggaaatccggcagacctgtcggcggtcaacaatcatgtgaagaactacgccggttcgcgtggggcgcagttggctcattacttgattaatgattgcttcggtgtctcttccttctttattcttgtctttttggcggtggcaggattgaagttgatgcgtgtgcgtgttgtccgtctgtggaagtggtttataggttgcacattgttactggtatggttctctatattcttcggatttgtgtttatggatcattatcaggattctttcatttatctgggcggtatgcacggatacaatgtcagccgttggctgatctctcaggtcggtgtacctggggtgtggatgattctgttgataacggctatttgcttctttatatatataagtgcgcgtacagtgatttggttgcgcaaactctttgcattgagtttcctgaaacgaaagaagaaggaggaagaagagcttgccactaccggagaagaaccgcaggaatttacgacctcccaaccgcaggaagtagaatttaacttgaaacggacatacaaacagacaccgcctccggcacctgtaatggatatacaggcggaagaaccccaagaagaatttccggtgagtgaaccggaaacggacgatatatcctccgcttcatccgatgagagtgaaggggtaaccatggtgttcgaaccaaccgtttccaatgttgttcctcctttggggggagagtcttcggaggatgaagaacccggttttgaagtggagtctgccgcttcggaagaagaatatcagggaccggaaatggaaccttataacccgacaaaagatttggagaattatcgtttccccacgatcgacctgatgaagcattttgaaaacgacgatccgacaattgatatggatgaacagaatgccaataaagaccgtatcatcaatacgttgcgcagcttcggcattgaaatcagcacgattaaggcaacggtcggtcctacggttactctgtatgagataactcccgaacaaggcgtgcgtatctccaaaattcgcggattggaggatgatattgcgttgagcctgtctgctgacggtatccgtatcattgccccgataccgggcaagggaaccatcggtattgaggtaccgaacaagaatccgaagattgtttccgggcaaagtgttatcggaagcaagaaattccaggaatccaagtttgacctgcctattgtgttgggaaagactattacgaatgaagtctttatgttcgacctttgcaagatgccgcacgtattggtggcaggtgcaaccggtcagggtaagtctgtcggtctgaatgcaattattacttccttattatataagaaacatccggctgaactgaagtttgtcctggtcgacccgaagaaggtagagttcagcatctactcggtcattgaaaaccatttccttgccaaacttcccgatggcggtgaaccgattattacggacgtgacgaaagtagtgcaaactctgaattccgtctgtgtggaaatggatacccgttatgacctgttgaaaatggctcatgtacgtaatgtcaaggagtataatgagaagtttatcaaccgtcgtctgaatccggagaaaggacataagttcatgccgtatattgtcgttgttatcgacgagttcggtgacctgattatgacggcaggtaaggaggtggaacttccgattgcccgtatcgcccagttggcgcgtgctgtcggtatccacatgattatcgctacacagcgtccgacgacgaatatcatcacgggtacgattaaagccaacttcccggcccgtatcgctttccgtgtatccgccatgatggattcccgaacgattcttgaccgtccgggtgccaaccgtctaattggtaagggagatatgcttttcttacagggagctgatccggtgcgtgtgcaatgtgcctttatcgatacgccggaagtagaggaaatcacgaagtttattgcccgtcagcaaggatatcctactcctttcttcctgcccgagtatgtgagtgaagacagcggtagcgaagtaggggatattgatatggggcgtcttgacccgttgtttgaagacgctgcccggttggtggttattcatcagcaaggttccacgtcgttaattcaacgtaagtttgctatcggttataatcgtgccggccgtatcatggatcaacttgaaaaggctggaatcgtcggtcctacgcagggaagcaaagcgcgtgacgtactttgcatcgatgataatgatcttgaaatgcgtttgaacaatttgcagtaatcaatcgtttattaatcaaatgaggaaatacatttttagtgttttaatagctttactgtcattgcctgtgattgctcaacaacagcagtcgcaggctaaagctgttcttgataagacagccgaagcatttcgtaaggcaggcggagtgaaggctgatttcattattaaatctgtgactaacggtttggtggaagggtcggaaagcggtacgattcagttgaaaggagagaagttcgtattgaaggcgtccgaagtgataacctggtttgatgggaaaacgcaatggagctatgtagtcaggaatgatgaagtgaacgtcagcaatccgacacaggaagaactacaacagattaatccgtatacattcctgtatatgtatcagaaaggattttcctataaactgggaacagtaaagacttacgggggaaaggctgtctgggaagtaattctcacagcgaaggataagaaacaggatttggagcgtatcactctttatgtgacgaagaatacgtatgagcctctatatattctgcttcagcagcgtgatcagcagacgcgtaatgagattaccgtgacaggttatcagacacggctgaattatgcggatagtattttttcttttgataaaaaacaatatccgaatgcagagattattgatttgagataaaatgtttttgaataacaaaacgataaaggtataattaaaatggcagaaatagaaaaagttaagtgcctgattattggttcaggacctgccggatatacggcagcgatttatgcgggacgtgcaaacttgtgtccggtgctttatgaaggattgcagcccggcggtcagttgacgacaactacggatgttgaaaacttccccggttatccggaaggtatcagcggaccgcagttgatggaagatttgcgtgcacaggcgagccgctttgggacagatgtacgtttcggtattgctactgcagcggatttgagcaaggctccttataaaataacgattgacggagaaaaagaaatcgaagcggagacgttgattatctctaccggggcaacagctaagtatttgggcctggaagacgaaaagaaatatgcgggaatgggtgtcagcgcttgtgctacctgcgatggtttcttctatcgtaagaaagtggttgccgtagtcggtggcggtgatacggcttgtgaagaagcggtttatcttgccggacttgcatcgaaagtatatctgattgtccgtaagcctttcctgcgtgcatcgaagattatgcaggagcgcgtgatgaatcacgagaagattgaagttctttttgaacacaatgctgtcggtttgtacggtgacaatggagtggaaggtgtaaaccttgtgaaacgttggggtgaaccggatgaggaacgttacagcctgcctatcgacggtttctttctggctatcggtcatcaaccgaattctgatatattcaaggattatctggatacggatgaagtgggttatatcattacagatggtgccagtccgcgtacgaaagttcccggagtgtttgctgccggagatgtggccgaccctcattaccgtcaggctattacagcggcgggaagcggatgtaaggctgctattgaggcagaacgttacctttctgcaaaaggacttatctgataaatataatgttcagtataaaaccgaaggatagtaatcacacaattccggtgtggtaactcttaaaataaaaacggtggacatcggttagaaactagtgtccaccgttctttttatattgggtttactctaagatgatttacacttggttaatacgcttcaatctcgtccagccataattcggcaggaatcacttccggaccattgataaagataaaagaagaagagaaatactttccttcatgatcctaaaatgtgtgttaagttataaatagatttgacacgacaaatttgtaatttctgtttgtacaaaattatttgtgcctattgctttatgcgtataaaagaatgaatcttgtttctctttcttatacaagttgtttaaagaacagaccttgtgtttataataaaaagtgagaacgtttattataaacgggtcttaagtttattataaacgattattggctgaactcttgaaaaatgggtgaagaatttaaacaaaatggggcgaaatccttgcagacttcaccccattgttagttcttacagtacacttgcgtgtatgcaatctgatgatttatgtctttatttttgtatgtttcatacctgttgtttctgatttgtttctgcaaatatacaaaataaaaaaggaaaagtcaataccctgtttccgttttgaagctgaatacataggcaatggtggctggcatcaatacctctttctccattgctattatttgagaagctgttcctcaatgatttgcacgtacttctccggagtagctccgacttcgacgataggtttgccgcctaccggaataaagaaaagagtcggcagcgcctgtactccgaaatgtttgcacaagtctttctctttatccgcattcactttataaaacatgacttttcccttatacttttcagccaattcttccattttcggaagcagtctcatacaagggccgcaccaagttgcccaaaagtcaacaaccacaggtttgtctccattataaacgaaatcatttcctgtccggtaatcaaaaatatgttccagaaagaattggcgggtaatcggattcatcttgccgtcttccgctttgacttccgttactttagcttccgattcgggaataggaaccaagtcgaaaggctggaagtatattttttgatgaacataatcaatggacaaaatgccgtagtccaatagtttctttcctaaaacagaatgtttcagagatggattcctcacggcaaaggcatcgtctatctttgttttcacgacattagtgtcccgttaaaatgggacgagttaaacaattaatcaaaaagccccggaatcaggggatcatttagatctttgacatcattgaaattagtcttgtcgaacaggtcacgcaagtgggttttgtcagtcaatgatatgctgagaatttgcaaaacttcataggttgaacgtttcaacttcatatcatgttggacaatagccacaagacagtacgtgataatagccacactgatttgtatgcgaacagcgttctctgttgtgccccagaatttctttatcttgagatgctgcttgagccatttgaagaacagctcgattaaccatcttttcttataaagattggcgacatccagtgcagaaagttgttttgcattcgtcaagaaagtgaactcacggtcatcctcttcgtcgtaatatcggacgagtctgaatgactcaggatattttttctcggagagatatccggtcagtttcacttccgcatctgtcattatgttctttggcattcttcgcttccatttgactgtcttatactttaagtttgtcttggctctgacaacaaagaaagagtctgtaagatgtatcctatagagttctttaaaggagtcataagccctgtcgaatatataataagcatttggttcataatggattgaagacattgctgtggaatcatgctttgaagcagtggttacggtatagaaagcaggaacttgtgcttcaatgtcgtataagacatgagctttcacccctcctttcttgcttcggaactttgcccatgggaatgttgcaagacacaacggaatcgttgttgaatcaaacgcatatttctttccggaaatgtcaaggatgttggtcgtccgcttctcgcaggcttccttcatcatatagaatgcaaagtcttcgaagattctgtaatcacggttctggttggctgtcgcaagagttgttttggctatcggttcacgacctaaaccaagatgatattgcttggccctatgcgcctcgaaagcaacgattaagtctcgcaggctttcacggttactcagttgtccaaacatcatcgcgagcatctgattccagcaagtgaaatgtttcacatatctgttgccatcatacttgcgaacatagttgttgaactgagtcctgttcagaaaagcggttaattgagagaatacgtatttgtcttggaacatagcagccatttgtattagactgcaaagttgcaaaatcaagtccgtttcattttaaaaaaccgcgtaattgactatatttcaataatttcaaagaactaattatccacttttacgggacagtagtgttttcacgaatattgtttccggtaaggtcaggctttcttcttcttgtgccgtctctttatagccgattgaaactttttgcggagttcccttcggataaagtgtgctccactcgttaaagtctttttcagtgaggttgattaatccgtcgctccatgtatctaaaataggaaaaattgttttatcttgaatcgatatcgaacatactatacctaaacctgttatcaattcaaaattttctctatagtttagtttcatgtacgaaggtcggtacggctgagtgatagtgatcttttttcgtcgcatgtcaatggtcaagacggaagttcggaatactgcagaattcaatactcccattactcccagtttgcgtagataaggttcatcttctaatatgaatgttggcagactattgctgaatgtattattaccaatagttaaggttcctatttcatagattttctttacgggaacctgtttgaatttgaaattctggtaacttccaaaactactggcgtttttcgtgttgattttcagttggttgacagcttccggaagtaatgcattatgtccggctaaatcaagtacaaaatttgctgtttctccatttatattggcttctatgataatttttccatcgattgttttaaatggaatgatttccgtcatactgttctgtgtttgtgcttttatgcctgaaataaaacaaaaagcaatcaaacatatatgtatttttattatcatatttctcaaattcatattgttttaaagtctatctttcttttttgatttctatttttctctcctgattgtcctttttaataataatatatcctgtatctccgggaatagcgttcattatctcttctatagcaatctggctcatcggacagttgcttaatgaggttccgttgatattgattacctgatcaccgaaagatacttggtctttcatactatcccatatcgttgtgatttcaaatcgttcgttgcgtggcaatatactcacattccaaagaacgggagcacctcccatatcagttttccctttttcgaatgggaggaagaagaagcgtttacgcatatagtctataatcacttttccatatttcagcaagtctactcctatgattgtttcattcattacgcttgtcgtgcagcctatgtttgtgaattccttatccatgatacgaatagaaggtatgttcagttttttgatttctacaggacttcccagtccggctaatccggcagatacaatcccatgtgcatgatttgtttcttttatatcggatatatcagccagcctgttataatcttgtatcgaatatagtagaaaaccttctgcaccagtgtcaaacaatattttcattgtctgttcttcttgcttgacagtgacaaatgagtgatattccgtttcatccagaagaggaactccgtctgttagtttcagtttctcggggcgatagggatagttgatgaccatgattctatagcgagagtcgaatgttactacagattgtgagaatgcgtctccaccgagaatgccggcgactcctaaatcagtgaaaaaaggatctttgggcagcaccattgtttttaatagcttgatttggtaactattgccgatggatacattggagacatatgcttcttgatagttttgtccctgtccgttcacatcagaaatgcgtgtatatcctgcagcgtttgcctgcatttcaagggctatatcgtacatcgttccggttttgccaccggtgtcgacgatatatttcgttttaacgccgttgattgtgacaggaataatgattttgttgtgtaccaattcatagggaatagtgtcgcaaaccttattttggatttgcgacatacattcctttccatagattagaaacattaacagccataaaccggtgagtatctctgctcttttcatatcatttcttttgcgaattcattttttctgcttctagaatagcttgataggcgttaacaatacctccggagatacataaatcatcaaaaaggaataaatcttgtgaaggtctgtcgtctactcgaatgcctttttctacttctactcctttgcgtgaggttacactttttaatagaatatcacggatttgtgagccggtaagctttggaaaataagattttatgagtgtggctactccggctacggtagcggccgctagtccttctcctgttcctgttcggtaagtgtctcccatgtatgcagaatatatatctgttcccggagcatagatatctagtgtatttgctccataatttgtatccataaccggatttccttttttatcagaagaggcgactatcataagattggtgagttctttgtctttactcattttccggttcgggaagaattctactttgtccatatcgatagatgtattccacgcgggaactatcactatggctcctttcttttccgcttctttcaattcatggattatccattgtttttgttcctcggggtataacatattctgttcaggcaatacaatcacatctgctccgtggctgactgcataatgaatggctaatgccatatctttcaggtaaggttccccttctcttgtacagatacgtagcgtcatgatttctgcttgatcggcaatgccatcgcttcctattttattgtcacgtttagcagctataattcctgccttcattatgttggttgctgcatcggatgtaagtagtatattatttccataattgctgtcatttatgtccattgggttgtcacctgtaatttctttccgttggtccgtaccatattttcttaaggcttcttcgtaagaggctttagctgtttccacacttttcttacccatattttggtatacaggttcccatttatctgtattatataaactgaaataataggctgtacatacaaaggctacttcagagaggctgtccctttccgctttagggtcataacaactttgaaactcctcgacggttaattcttttccagggaagcgctgcttcatgtctctattaaatttttcaacgtattcttcgatgacataagcaagttgcagaccactgtaagtacttcctattctggattcgggcattactttatatcgataatagttatattcttccatgttttccggtgcagctacttcctgacgtgttccattaataattttataatactttttcccatcaaaaatatagtctgcatatttatctttcaagcggaagaattcacgttctccttctctcgtcaaagactccacaacttgagcatctttgcccccgaggaagttccaaccattaatatcatcaatgagaccatttctatcatcatctttttgatttaatttttctttgggattgatccatatagcctgtctcagatcttcgtgttccacgtccattccggttccgattaatgcgacaatcggccttttcttgagtttctttttgttagcattcaaatattcataggctttgttaacttcagcgccatatacactgtctctgtcgaaagaacaattgtaccagtccagttcggattgttttttttgtttttcaactttttgttttattaattgagctgatgtaattccacaaataaggcagcataagataagggatataagttttttcattgtaggatgagttatgatatttatatagtcagattaatttctagcttttaatatggcttcacgtacttgttctccgcggacattacgtgctattagttttccttctttgtcaatgactacaaggaaagggatggcataaaagccataagctgtctggatagcacttggagcttcattacttttcggaaagcctgttttatcccacagcattacccagggaagtttttcttcgtccagcatctttttccacttagcttggctatcgtctagtgatacgctgatgaactccaaatcgtcagctttcagttcattatatatttttagcatactacgcatctccttacgacaagggccgcaccaggaagcacagaaatccaaaacgacaattttaccgcgaaagtcttttaaattgaccttctgatcattgacattcgtgaaagtaaagtccggacattctgcaccaataatttggtgggaaaggattttgactctttctaccagccagcgggcagataaagagtttcgctcatcatcggaaatcatatccaataatttcttattagagtaatagtcatttacattggccagataagcaagcgcggataccatattaggtgacagttgcgcgttagctggaagagaaacagttgctgtgtccgggtctttatctgcgggtaaatattcttgcagagtgagaaacgagtcgatacctttaaacgacagggaactttgttcgggatttgtctcatcatagtagccgatgatgttcacttcatggttctcgaaatatattttttcttccgtttttccgattcgcaatgtgtagatatcgggttgaatcagcttctgttctgtggcgaactctttattgggttggagttcacagctaagaataagtgttccgttcaggtcattcacttgcaaagtggttggtttcagtattcttaacttgcctttaatttgtagtccatctttgcaccacgaacttgtcgtggcgcataagaaggacgaaaaaaataaaatgaaaagtttctttgttgatatcatagaattgtatttaaataataatcgtcacaggagaatagttaccagtcaaatcctggccagggatcgtcatcgtctccaccgtcttcatcgttgttacccggtatttctggatgaggctgaatatcccagtcattcggacctttagctatggcttccaaatcaattccataattctccttcatgtatttgcgtacgaaagcgaatttctcaataataagcgggaattgactgtatctttcggtactttcggcttccgtataatataatgatagtaaggcatatccggcaaatgttgcttcccgggtcgggttgctgccgtcatattcttcattcagtgtgaatttatttgtatttacagtacctggaaatcccctgttcaagtgaaaatcaggactatctgtttcccaaaaatagaatgatataggagtcacgtaatccaaaccacggttgaattcttcgggaatggtaattagccttttttctacagcagcctttatgatattaccgagaatcattttccgacgttggctgaacgttacttggtcgtccggcataatatatttgtcggtcatttctgcctgaggtccgaataaacaggtgctccagtaatccagaccattaatgatttcgtgcatggcattattttgtttgataacgactgctcccaaatctatttccgttgctatatgcacattataagccatataccaatataacggtaataatttgcttgtaacctttttacacttttcgttattgaggtaggagaatacatgtttcttcataaattccgtatagaacttcgccatttcatcgttgatacacccttcccctttataatttgtggatgcacctcctgtccagctacgattgaaatcttcatcttgcagatctttataaatcagatagacgccgaaatctttttgtatttgtgagatgtcatcatcccagctattcgttccttggggaactttgaaacgtaattcaatgcctccttctgtgggggtaagtgcatcttcttcatagcatgaggtgaatgctatgcaagtgaggagtccccataataaatatatatttctcatatttgtttcttttttaagttactgaaattattagcattagttttctcgtttaggagccaaaggattttgttccagtcttttatttttaatcaatacttcatccggaatcggcatggtataagaagggtcgttggattttagcgtatatgttttaccttcccattcgtgtgtgatttgaggcattccgtagcgtctcaggtcgaaccagcgttgtccctcaaaacagagttcttttcttctttctgccttgatgaagtttttcaacgtctcaccggtcaatccggcagggacaactaacttttctggttcgtatcgattctccaataaagttctcatagctgaaagcgccttactttcttcgttattgtaggcagcagcttctgcaagattcagatatgcttcactcagtctaaaagagagtgcaaaattctctgaaccattaggctcgcccattgcagatagttggtatttcccgaaagaactgtaatagtccggataaaaactgttatttattctgttatattctttagctatgtatttttcttttcttaagtctccatctttaaaactttccaacagatcatcggaagctgtgaaggctttccgatagtaggtaatatttattccccaaccgggataatcggggtcttcctcttcacgagatactgtttcgttattaaattctgtgagatcagatacatttccatatagccagattacttctgatgatttcaaagacgtgaaattgtaataaggttctgctgttgacgtagaaggcagattattcaaattgattaaagagaaagaccactcattgattaccttgtcggcatatatcgctgcatccttccaattttccatgtaaaggaaaacacgggatttcaataattgtatcataggaaggctgattaaatagttcggttcgtattgcttatctttcgataaagtgagaaacaaccgttccgcttcgctcaaatcttctataatctggttataaacttcttctacactattacgtgtcattaataaatcttcttcgggcagtaggttacttgtcaatttaagaggtactcccgctgcttgcttgtcataattataaggtgcaccgaagtgattgactaacatgaagtagtagaatgctcttagacctaaagcttgggcaatcacatagttcttttcagcttctgttccgtttacatcaccaatataatcaagtgcggcatttgcccctaaaataaatttatagtaaccttcccagatattgtaaacaacgggactgttcttttccattatgaagaacatatccggttgccatgtgaaaactgctttcttggattctacatatcctaatgagttggaatcgaactcatacccggttttgtggaactggacatcatcatcgaggaaacttaaaaaacctagtaaattgttgcctgacttatgttgggggtaagcactgccgattagcatctcttggagggcgttagcgtctttaggaacatattcgctttgggatttcggttccagaaagtcggagcaggaggacagtgataataaaacgattcctataattgtatatataaattttttcatcttttatttttttagaaaccaatgttaatacctagtgagtaattgcgcggaagtacactattgctgatttccgggtcgaacccgttgaaacgtttgctggcgataacgaagatattatccatgttgaagttgagtgacaagttcttcatgtatatcttttcgcaccattcgcgtttcatttgccaagataaaccgatattacggcagcgtaggaatgaaccacttacaaccatagcatcagactgctcccataccgggattttgaaagtactctctccattaggtaattgtatgagagacatattgcccttaggcagtgaaggtatgatagtatgtgcttcgtctcccggctctttccaacggtttaacaaatcacggtttatattcgtatatgggtctggcatatagtaggaactgctaaactgcgagtagggcgagggcagacgttttttgttgccaagcaagagtgagaaactgctgttcagagtcagtgatttataccggaaacttaaacttaatccacctgtaaaatagggatctctttgccctgaataaaccaggtaggtggtcgggtctatcaatcggcttcgttggtcatccggaatatccagaaggttgaattgaggttctccggtttgtccattcagaccggcaaatgagtatgaccagaaactactaaggggataaccttgtttgagtatgatatccgagcgtccgttcagaaaatcactagccttgacttcgatatccgtatgcccgccctcgttccagtttttagatgcattcaggctgacacttaatgcatagtcacgtttttgtatcggagtaaaagtcaatgtatattcgatacctctgttgtggataatacctccgttacgtttcatagaagaaattccatattcataaggcaggtctaattcgacaatcgcattagagcgtcttgtgtaatattccagattcatgttgaacagattaaataattccagatcgattccgaaattccatgatttggtacgttcccaagacagagtcgggttcggaatctgggaaatagtagattgatatctattgtatagatcagctactgttccttgattcagaattagatccgggctaagacgtgtgagtgcatttccctgaataccataagtgccgcggaagtttaagttagttatccagcccacatattttctcataaacctttcttctgaagccctccatgagaaaccaaatgagtaggttgggtcaatacgatgattggtatcttgtccgaagcggttggatgcgtcattacgtacattggcatttattacatagcgatttttgaatgaataggccagtgtggcaaatacagagaagaaattatccgtagtattaacttttctccaaccaccgtcatatattctttgtagaatgccccaaccgctgttttgagaaccggtaatcggttcgaaagcttgtaaggtggtcgggcttgtgatgacttctcctctatcgggaacatatccccataccgtattgttgattcctttgttggtagtagaacgcaattccatacctactagtgcattcaatcggttctcatcattaaaagccttactgaattgcaacttgttctgtatgttgtaagagtattgatgtgtgttgttagtaaacaattcaccaccaaaaggaagtaaggcggctttgaattctttactggctggtgaaaccgagttaaagtcatatccgcgataattctcggcaatgtaaaatgtccgttccgattcccatgcctcgtttgtactattattatccgaatatcctccggtgaattgataagtcagccagtctagaatgttccattttaagtcaagtgaggcggacagatagctggatgctgattttgagccgctattctcccgttcattaatgaaattgtatgataacgatcttactccttcattatatggataggaggctttcatctgataatagacatcagggtctattgaacggttagtggtagtggcatatcctaaaggattgactcctcccgcaaatcctttattcgtgtttacacttccattgatagctgcatttatggttagtttctgtaccggacgtatagtaatagcaagacggccggtcatgcgttcactatcatttccaatttcttgtccttcgcttttggaatatcccatagaagccgaataactgtatttgtttgttccgccggaaacacttagattgtgattatggctgaaagcgcggcgggttagtagtttgaaccaatctgtgttttgtgtttccaaaacattccgttgggcaaggaactcttcagaggatatatcatgtgataaatacatattcaataatccttcgtacgtgtacatttgtttgataggttcagcactgtaaggagttccccagttgaaagcttcttgtgagaacagtaccctttcttttgaattcatataattgaactgatcgtaattaggtcgtgttcctattataaaattggatgtgtaattaacgcttaaacgatcagtagtattttttttagtggtaatttcaatgacaccattagatgcctttgaaccgtaaatagcagttgcagaagcatcttttagaatactgatgctttcaatatcggccggattcagccaagatatctggttaccgatgatattttttaagtcattggtcattagagaggtcgcatccaattctaatgggtcctcctgaataattccgtctactacccataacgggtcctgattacctaatagtgtacttgtaccacgaatctgaatcttgggagcagtacctacgcggctactggtattggtcactatcatacctgccacacgtccttgtaacatttggtcaatagtggtatacgaaggcattatgatatccttggctttgacggtagtgatcgaacctaccaggtcacgtcgctggatgttctgataaccggttaccactacttcgtctatttctgtatttgaggaattgtttagagtgacgttgatggttctctttcctgtatatttgactgttttcttttccattccgatgaacgaataggtcaatattagtccttcctgtgccggaatgctaaaggtgtagtgtccgtccaatccggcaatagctccttgctttgatcctcgaacactgaccgtagctcccggaagtgcttcaccgcttgtgtcacgtatccaaccgctaatagtgattttgtcagtttttcttttcttgataacgatagcactacctgaaatttcgtaagtgagattagttccttccaggcattcgtccaaaatttcggtaattgttttgtcttttgctcttacactgatatcagtaatgttagcgatatcttcagttgcatacataaagataaattttgttcgattttgcaggtaccagagtactgattctaaagtctcttctctaagatcaaccgatattctctggttgtcttgtgcctgaatcataagtgaagatagagagaatacgcataaaaagcagagcttgataatatttctgctcgtacgcgatatccctctgaataaggaatgtgctcgtcttttcataagcgttagttataatgtattagtaattatttataagagatatgcagaacgccttctctttgttttatatctaccaggttcagttcttttatcatgtcaataatcggattcatatttgcatatcgattaagataggctccaatttttacttgtttgacagcatcatcttcaaatgtgtatttgaatccataccatttagaaagatatgacatgacactctcaagagggatatttttgaatatgaatgaaccggattcccaagatgtgtataattctgtatttacattggttacagtatttcttttggaattcttgtcaaaaatgaaatgttggttgggagttaattcgaaatcttcgtttttacttttaatttttatagatccattaataagtgtagtgctttcaatattctcgtctggataggctctgacattgaaagttgttcctgtcacttgaatagaggtatatggtgtttggacaataaatggatgttcactgtctggagcaacatcgaaatatgcttctcctttgatttggacaatacgttgttcgttactgaagcatacaggatatatcaattgggattctgcgtttaaatgtactttcgttccatctgacaaggttatgtgacattccattccatgtagtgtttgcagggtgtttttgatttcttttatttgaggtttattggtaggcatttgataattgatacctttggaatcaatgataaacatcttgcttgtcccttctggtaaagctccttccggaattttgaatgtagtgccgttacttaatgtaacttctccgccatgtgtgccgggattgatttcgctaatcggttcttcagatatccatttatatataggataggaagccggtatcatgagtagtaagataagggctgcatatctcatacttcttttccacagaaaaaggttaggtgctttttctccatttaacagaggataaatcttttcccatgctttttgtgaggaaaagctctttatcaacagtgagtgttcttcatatgtcctctgatttaatatccggtcggctatcttttgatgttccggattctcattaatccatttatggtaactctcattctcttccaaggttgacgaatgagtgaatatggaggctaatactttagcaatcttaaatttttctttaaatgattccatcattttttcaattggttcgtatataaaacaatccaaatgaaaaaatggggtaatcaaaaagttactttatttgcatagaaaaagacataagatgtaattaattccttttaggctttctcggagtttgcgataagctattttttttaacttatggacagtcccttctgagatttgcaatttgtcagcaatttcattgttttttaaccctttcattgaatataagatgatattccgcatttgagtaggtaattcttctaccgctttgcgaacaatgcgaaatgtttcttgctcaataatctcagcttcaaatccattgtcatattcttcttttccgtgaaaaaaaggaatatctagttgtgcgtgtttgaggtaattcaaacatttatttcgagtgacagtataaaggaagctttttactttcaggatatcgttgaagtcttcttttcgttcccaataagccaacaatgcgtcttgaacaatatctttgcagacttctttatcttcaacatagtgaaatgagaaaacgcaaagaatagggtagtagtcatcaaatagctttttgaaagcttgtttgttaccacgcttgatgtctgcaattatattttctatatgtgtgttcactgtttaaagcggcgcaattggcataaaagagttttttatccaattttgcttattttcttcagcttttcttcttcgatgatttttatctttcttccgtcgattgtgattaatcgttctgcggcgaattgagataaagtacgaatagcatttgaagtcgtcatattcgataaattagccaaatcttcgcgtgaaagataaatgcttagggtagaaccgtcttcttccagcccgtagctctctttcaggaacatcaacgattcagccagacgtccgcggatatgtttctgtgtcaggttgacggtacgttcgtcggagataccgaggtcaatagaaagttggcggataaagaacatggccagatcgttattctgggcaaccaaggtggtgatagcactcataggaatcagacagacaacggaaggttcaaaagcagctgcagcggtaacgaagtcctgtttcgcaaagtaggcgcggtacgcaaaatattcccgcggtttgatcatgcgaataatctgacttcttcctcctacaccatctttgaagatttttactttgccactgatgagacacatcaaatgagagggggtttctccttcacaataaatggtttcattctttttgtaggtctgtatcgtataattattcatcagaaactccttttgctcattatttaaaggagctaacatgtcggataacggttccgaaatatctatgtctgacatattcatttttaccatgggtgctacaaaactgtgttatacagcacaaaagtaaaaataaaaaatgagaaaatgaacgaatctataaaaagattgcacaaaagcggtagctttcgtgcaatcttgaaaacattttatttagtaaataacagttccctatacttcggtagaggccatatttcatcgtctacttccatttctaaatggtcgatgtgatctcgtatctggtcgagatacggacgcactttatcttcgtatgcaaatgctctttccttgtagttttcaaggtggttggctacttttcgcgcttcggtcatttcacggaccagtattttaatggaggtcacccggtgggagatctcacgaatcaactctttacggtcggcgctcaacacttcgtattcctcggcagagaagatttccttcattccgcgaagattttcgagcaggcgattctgataagccacggcagtcggcacgatgtggttgatagcgaggtcgcccaatacacggccttcaatctgaaccttcatggtgtatttctccaattccacttccaaacggctgttcaactccgtttcgttgaaaatgcgttcgccgataagtacggatttggattgattgtcaacgtagtgcatcagagcttccgggacgtggcagatgttggtcagtccgcggcgtgcagcttcctgtttccattcttcggaatagccgtcgccttcgaaacggatcggttcggaagcgatgattgtctctttcagcagacggaagatagcttcgtctttgcctactccttcctccataagcttttccaccgatgcgcggaattcgttcaactggtttgccatggcagcgttgatagcaatcatggcggcggcacagttggaagaagaacctgcggcacggaactcaaaccggtttccggtgaaggcgaaaggggaggtacggttacggtcggttgtgtcgagcagaatttcgggtatacgtccgatacccagtttcagcgttgtcttttcttccggggtcattttctcgtttcccacctggcgtacaatttcgtcaagagttgccgaaagttgtgaacccagaaagcaggaaagaatagcgggaggagcttcgttggctcccaggcggtgactgttgctggcactcataatagaagcacgcaatagattctggttcttataaaccatcatcagcacattcaccaggaaagtaaggaatagcatatttcctttcggattcttgcccggtgcaaacaggttgacgcctgtgtcggtgcaaagcgaccagttgttgtgcttgcccgaaccgttcacgccactataaggtttctcgtgcagaagcacgttgaagtgatgcttgcgagcaatacgtttcatcaagtccatgacaagctggttgtggtcgtttgccagattacagttttcgaagataggagccagttcgaactggttgggtgctacctcgttatgacgtgtcttggcgggaatacccagtttgtggcattcgatttcgagttctttcataaatgccgtgacgcgtggagggatagagccgaaatagtggtcttccaactgttgatctttagcggaagaatgtcccataagcgtccgtcctgtcaggcagaggtcgggacgtgcattatataaggaggagtcaacaaggaaatattcctgttcccagcccaggtttgtatatacacgagtgatgtttttgtcgaatagctggcaaacttccgtagcagctttgtctacggcagcgagtgctttcagcaatggagttttgtaatccagtgcttcgcctgtgtaagaaataaagatcgtgggaatacagagagttgtgtctacaacgaatgccggagaagaaacatcccatgccgtatagccgcgagcttcgaaagtattgcggatgccaccgttgggaaaagaagaagcatccggttcctgctggataagcagtttgccggagaagcgttcgatgacttcaccgtcttcaccgaactcgataaagccgtcatgcttttcggctgttccgtccgtcaggggttggaaccaatgtgtgtagtgagtaacgttgagcgacttcgcccagcttttcatgccgttggcaatcaggtcggctatttcacggttgataggtgtacctttttcgatagcgtcgattaccgctttataagcttctttgggaagatactcttgcatcttcttgcggtcgaacacatggctgccataataatcagagagtttgttggaaggagcggtcacttccaaaggtttccggttggaaagctcttgtagagcaaaaaaacgcatttttgacataaatagtctacttttattggttgctgggcgcaaaattatatgttttttctgaaagtacccctgtttttgtaggggtatttttgaaaataagtgtgttttttgagaaatacccctgctttttgtggggaaggtagacttttttcttgtattttataaaatatagaaggagatgataccaattgaaactttagttttataagtttgctgttggttcaaagcaagtttattattgggcaacaggaagtttgttgttagtagataacaactattaattgataactctttttagtgacacattgcctttgcttttcgatattcttttctatatttgcctacgttaatgaaggagatacgacgattgagagttaaaatattgataggatgcatagtatgcctgttttcttttatatcaaagggaacagccaacaattatataatgaatccctataccagtacggagatctcggctgactccattatcgaacgtgtcatgacttttgcccctttgtatgagacaatagtaagcgattatcgcgcgaacctatatataaagggtagaatggatatccagaagaagaattttattctccgctacgtaccttccatgttccgtttgcagaaaggggtgcgtgaatatatgctcgaaacatacagtgaccttcattatacggctcccaatatctacgaccagaaagtaaaagcctcgcaaggtacagtgagaggaaacaggggattgccggggttgctcgaatattttagtgtaaatatctactcggcttcgcttttgaacgatgaacgcctgatgtcacctcttgccaagaacggacagaaattttataaataccggatagatagtgtaatgggcgaccccaataaccttgactaccggatacgctttatccccaaaacgaaaagcgatcagttggtaggaggttatatgattgtcagcagtaatgtgtggagtgtacgggagatacgtttctcgggacggtcggaactgattacctttacttgctggattaaaatgggagaagtgggcaagaaagacgagtttctgccggttcgatatgacgtggaggccctctttaagtttttgggaaacaaggttgacggctcctatacggcttctttggattataagtcgatcgaactgaaagagaagaaaacacgtaagaaagaaaagaagaaatataacctgtcagaatctttctcgctgcagtgcgatacgaatgcctacaaaacagacgcttcgacttttgccatacttcgtcctattccgttggcggacgatgagaagaaactgtatcaggactaccagttaagacgcgataccgtggtcagtcagaagaaaacgaaaagccaggctttttggggaacaatgggtgacttgatgttggaagattataaattcaatttatccaatatcggaagtgtccgtttctctccgtttatcaatccgcttttgttcagttatagcggtagtaatgggttgtcctatcggcaggacttccggtataaccgccttttcaggggcgataagttgctccgcattgtccctcgactggggtataacttcacccggaaagagttctattggggactgaatgccgactttgagtattggcctcaaaagcggggattcttccggctgaatgtgggtaacggtaaccgtatttatagcagtaaagtgttggatgaactgaaagccatgccggacagtatctttaatttcgacctgattcacctggattattttaaggacttatatttcaatttcttccatagcgttgaagttactaacgggctggatataagtgtcggtttctcggcgcacaagagaactgcagtggagcgttcccgctttgttattaccggtgactatccgatgccgcctcccgagtttatggataagttcaagaatacctatatcagttttgcccctcgtatccgtgtggaatggacgccgggactttattactacatgaacggaaagcgtaagataaacctccgttctttctacccgactttctcggtcgattacgaacggggtataaaggatgtgttcaaaagtacgggggaatatgaaaggatagagttcgaccttcaacatcaaatccgtttgggactgatgcgtaatatctattaccgcttcggattcggcgcattcaccaatcaggacgaactgtattttgtggactttgtcaacttttcacgtcacaatcttcccgtagggtggaatgatgaaatcggtggtgtgtttcaggtgcttgacggacgttggtacaactcctcccgccgttatgtacgcggacatttcacgtatgaggctccgttccttgtcctgcggcatttgatgaagtatactcgttatgtacaaaatgaacggatctatgtcagcgccctttccatgccacatcttcaaccttatttggaagtgggatacggcattggcacgcatatctttgatctcggagtttttgtgagcagcgagaactggaagtttggcgggataggctgtaagtttacattcgagttgtttaaccgatagttttctgcgttccggttggatatccgggaattattttctacctttgtgtagaagaggatgagggcagaatttagcacaagagaggtgtagtcgcctcataagcacaggtattttcctagaaaataaattactaggtatacatacctaaatttattttagtaaataactcatcctcttctccttagttttatacagatgcacaatgaacaaaattctaataacgatacttattatcaccggctttttgatttaccttaattccgcaacactattacaaatataactttttaagtacctgagcaacaaaaagttgctcaggaatttgccatgtcagatttttcacctatcttagtgttgcaaatcaaaatatgtatcaaacccgacagacatggcaaaggtagcaattaaatccgagaaactcactccttttggaggaatattttcaataatggagcaatttgactccagactctcatctgtaatcgactcaaccctcggtatgagatgcaggctgtatggttatcaatacagcgaaatcatccgttcgcttatgagcgtttatttttgtggcggctcatgcatcgaggatgtcaccactcatctgatgtaccacctttcgcttcatccgacacttcgcacatgcagtgccgacacgattcttagagccataaaggaactgacccaggataacatttcctacacatccgacactggcaagacctacgacttcaacacggcagacaagctgaatacactgctcctcaattgcctattgtccacagggcagctgaaagagggcgaggggtatgacgttgacttcgaccaccagttcatagaggctgagaagtttgatgcgaagcctacatacaagaagttccttggttatcgccctggcgtggcggttattggcaacttgattgtcggcattgagaacagcgacggcaacacaaatgtccgtttccaccagaaggacacgctgaagaggttctttgaaaggtttgaacaaaacaagcttattatcaaccgtttcagagctgattgcggctcgtgttctgaagagatagtggaagagattgctaaacactgcaagaccttctatatccgtgctaaccgatgcagttcgctctacaatgacatctttgccctcagaggttggaagaaagtggaattgggcggcattgagtttgagctggcctccattctcatcgagaaatggaaagggaaggcataccgtcttgtgattcaaagacagaagcggatagacggcgaactcgacctgtgggaaggagaatacacctaccgctgcatccttacaaatgactacgagtcttccgagaaagagattgtcgaattctataacctccgtggagggaaggaacgcatcttcgatgatatgaataacggattcggctggaacaggcttccaaaatcctttatgggagaaaacacggtgtttcttctgcttatggcactcatacgcaacttctataaattcatcatggcgaggcttgacgtgaagaggttcggactcaaagcaacaagccgcatcaagacgtttgtctttaagttcatctctgtgccagccaaatgggtcaggacatcaaggaagtatgtgctgaatatctattcatgcaacaatgcttatgccaatgtgttccagaatgactttggataacaccgacaacttatagtcgtgattttgcgtattgcctcaagtcgcatggtggggtaaggggcatttatatgtctttatggtgacattcgatgcactgtgccccctttttactaacgatgcagattcttttcgcttctgtatcatattaggcgcgtagttgcggatttgaggatttataaaatgatttcctcgagcaggagacaagaagggtataaaaggtggaaagcaacaggcggtggtaaagaagaaaaggttgataaaacaaaatgggagcgaggatcctggcttcgtcatgcaatgggtgttactactccggtggccccctatactccgagatttgaaaaagaggctgtaatctggtgtgctgctctgttaggagtggaagtgaaccgcctggaagaaatattgaacaatgtttccgggcattatcaggagttttggatgagaaagagaagcggagggtatcgtatgatttctgctccggacaaggatttgcaggctatccaatctactatttattcgcgtattttatcatcggtgacgatagttcatccggcagccgtcggttttcgctgcggtcggtctgtggtggacaatgctgctcctcatttgggtaagcggtatgtgttgaaaatggatattcatgatttcttcggctctatacgaagcccgagagtgaggcagacatttaagaaaataggttatccggagaatgtgtcgaaagtactgggggctttgtgttgcctgcacaggcatttgccgcaaggagcgcctacaagtccggctttaagtaatattgtgggatacgaaatggacaggaaactcgcagcgttggctgcggaatacgggttgacttatacccgttatgccgacgacctaaccttttcgggagatgtgtttccgaaagagcagatcatccctcaagtcaaacggatcattcgtgatgagaagttcgagccgaaccataaaaagactcattttatgaatcagagtagtaggaagattattacgggggtgtctgtcgcttccggtgtgaagctgactattcctaaaagcaaaaagagggagattcgcaagaatgtttatttcatcctgacgaaaggtctggcagaacaccagcgcaggatcggctctcatgatcctgcttatctgaaacggcttatcggaatgctttgctattggcgggcgatagaaccggacaatacctatgcatccgattccattgctgctttgaaacgtttggagaaagggtattagtccgcaatcgttactttttcattgtctattttggcataattcttttttatggctttattgattcctctctgcatgacagtgtctatgtttgatcccatacgtgtgaaaccgaattcttgtgcgcacgctttcaccaaatccgccaaaggaagactgatagaatcagccaatagttgccgtactgcgttggctatctcttcgggtggcaaatctgttgcatcccgatcggactcggggcggtaaccggaatagagacagcattgtacttcatctttccagaagaagacgagaccatcgtatgtggtacggtagaggtgaaggctgtcgaagatcttttccagatgcgcttctatccgttgtcccaaccggctgattccccattcgaccagaacctttttgcagagtaatgatttgctgatgggggcttcgttttctatgagtttccggatttgaaagataagaatagggatgttctccgtagcgaagaaatctttcgaagaatatttgttcgggttcactttcgtgctgttatactttcgttggggaatatcggcggagattatttccggttttgcgaaaaccggtgttgtctttagcgatacttcctttatcggtgcctcgtttagtgttacttcttttatttgcccaccttttatgggttcttcgctgcgtgtttctttccaggttggttcttcctgccgaggttcttcttgtttggaaacggaggttcctttgctgattgcttcctgtatggatgcaatgacttcatccggcttctcccaccagtccattgtccaaatgcggcagatgttccagccgagtgctttcaatacattgttttggacaatctcacggtcgcgtgcggttttcgtacgtttgtagttctttccgtcacagatgatacctagttgataattggatgtgttttgaggatccacaattccaatatcaattttatagccagaacatccgatgtccgtatgtacggtatatcctaaagagcgtagtttgtccgctatgatattttcgatagataccgtttcttccgataaagagggaagggagctgccgggtgtgttccttgtacctttttccgcatattcgagaaaccgtttcagtccggccactccgatagacgaagtccggttgaggtctatcatatccgatcttaaagtagagaagattatcatctcataccgggcacgggatacggctacattcagtcgcctttctccgccgatccggtttaacggaccgaaattcatgctgacacgcccttcggaatcgggaccatagccgacagagaaaagaatgacatcccgctcgtctccctgcacattctccaggttcttgatgaacaaaggttcttcactttccagtgcaagtgtttccagttcggggtgaaagatgaagaggtcggatagcaaatcttctatcaatgcttgttggacgacgctgaaagtaacaacaccgatactcttccgccttaattcttcacttcttaatcttcttgctatttcgtctactacggcttgtgcttccgcccggttttggcgggactttcctttgtcatagtaaccgtcgattgctaccattctcactttggattcaatgttgtccggagacgggaaggtcattagtttattgtcgtaatattccgaattgctgaaggcgataaggctctcatgtttgcttcggtagtgccataacagatatttggaaggaatagacagtgccaggcaatcatcgagaatgctttcgaggtcttccagttctatattatcctcgtcaacggtgttgacggagaagaagctggtgggaggcatttgtttcgggtcacctacgatcactacgttcttgccgcgtgcaatagcacctacggcttcgtaagtcggcatttgtgaggcttcgtcaaaaacgatcagatcgaatttatccgcatctgcgtcaatgtattgggctacggaaagcggactcatcaacatacacgggcacatacgcgacagtagagtggggatctggtcgaacaacttgcggatagatatgccacgtgcattgttgcggatattcttctggagtatgccgacttcggaactctggattgctgcatgagtaaaagacggaatgtttgaagctaatctggcgaacaactctctttgggtgattgtctcaaaattcgtcgatatttgtttgtatttcgctatgatatcgttgaatatcttgccgttgaataattccagtgtcggctcttttgagataatatagcggatagctgcctgataaaaactcttgtggaagctgtcgataagctggtcggtcgggatattcttctctttatattccagggcaatgaatcctatacccagtttatccagttggcggtatgcctggagccactggtaccagtctttgagcttgtccagattttctttgtggaggcgggcttttgccagagcggtgtttatccagtcggcagagttcatgtaaagcgtttcggcagatatgcccagcgtggaagaaagccggttctcaatgtttaccaatctttcggcaagttggtataattcatttagggaatgggcgtgcatatctctgaatgaccggagcccttccgttagctgcacggacaggttttgcttgatttgcgttgccttggcaatattcttcgaataattcagtagaagggaatggaggactcccatatcattaatgatctgttcaattgtgctccagtcttcacttcttccgaagcctccgaacagggaaggcagcctgtcagcgtgtttccggacgaattccgcttcttcctgataatggatgatttggtggagcaggggcttgacggcttccggtttgacaggcttcaaagcatatagattgattgcctttttgatttttttctgtccgaaatatctgggaagaaaccattgggcgctcaccctgttccattctgcgagcatttgtgttgcatttatttcgagaatctctttggtgaatccggtttctacagttgcttttatctcatcacgtttcctgccacgagcggacacttcgcgatattcgtcgagagtctcgctcaatgaagatgctgtcagcaatccgggagtgagttcgggaatgtcgagtacttttcggacaatgtccgctgtcgtttggaaatccatgcgtgtggggtgcatatccgtatctttcagtagtgtgggaaatacggataacttcggctgaattgtgctcagcaagtcgatgaaagtgctcagtaattgggcagcttcttcttttatggcagacgaatattccgcaatagagattcccgatagcggatgttgataaggatgtccgcaagcattggcagttcttaccagagtttcgacagcttctttccattcggagaatgtttctttgttcaatgtatccagatagctttgcggaatatcaaaacaaggctctccgtctgttgattgatagtgaataatggcatcgtataaagaaatgccgaaaggatattccttatgtaaggcttctgtgtatccgtttaattccgcccgcagttgcaacaagcgttccgcttcctttttaaattcttcgggagaagtctgtttgatgatttcagtcgtttctctaagttgtgagataacggcggatttcttagtcttgttggagtgaatttccaggcagaagggagcaagtccgatcgctgccaacctgttttgaacaacagagagggcagccattttttctgctacaaataatacacgtttgccgttgtataaagcattggcgataatgttggtaatggtttgcgactttcccgtgcccggagggccgtgcaagatgaaagtcttgtcgtgtaccgcttcatagatagcctccagttgggacgaatcggcaataataggcaatacgatatctgccggagacagttccttatccatgtaggtggcatctatttcttcagttgtggcattccattctatctttccgttgatgaggctcgaaacaattttattctgagtcagtttattggcattgttgtggatatcattccacatgataaacttgttaaaggagaatattcccaggatagcctgttcttccacgtcccatttgcgctggttcttaatgctgtttcggataatggagtagataagcttgacgtttacaccgctttcatcagtcggcaacgggtccagtccggggacggagatcccgaagttttggcggagcatttccaacaaggtgatattcatcatcgtttcctcctcacgtgaacggatgacgtatcctttggccgctgacttacggatgatttctaccggtaacagcaggataggagcatagcggggacgttcgctggaaggtgactcgtaccattttagcagtccgagagcgagataaagcgtattcgccccgttttcttcaatagaagtacgggaagaacggtacaagtgggtaagcgctttgctcaaatcattttccggcagataaaaacgtaatcttttctgggaaagctccgaatttacaaaatctgtaatcgggtcggaagccggtattgaagaatagatcccgaactccatgtccggattctcccagtcggaaggacggtgcaggatgcggaactcttccccgtctgctaaagcgtcttccaggcaggagagattggcgggaataagttgaagcgtgtttttggtaatccggatattcagcaggttgttgcgcaggcttaggtctaatagccgtcgttcccacaatagttgtttggttatgaccgtctgcgtttcgttgccggataaatcgtatggattgatactttgcggggtggcataagccgtatctttattatataaagcggtatcttcttctatttcccagatctgtccgttcagtacccgttgcggtacgggacggattcccgaatgccttgcccgcttgacatctatcgcaaggatgaacttgcttgaatcggtcagtttaccgtttgcgcttttcactgcgtcatcgaaatcggaatgctgtcccatgttcatgcaggtcgtttcaaccagcgtgatgtcataaatcccctcggcagtccttttggttaatagcgaaacatcatcaattgtagcgtccggaaaagtttcgggcaccagccaagcacctgcaaaggcgtgtccccgggcgatgatgaggagagcattcagtccgatagcttccaggcaggaggcgtaaagcaacgccatatccaggcaagtccccagcttctgagccaggacggaatcggtgagccggatgcgttgcccgtactcctcaaagctagccgggatagtgctgtaaataatctgctgctcggtgatagcagtatagacggcggccatttgctttcttaccctgtccgggttacggctctggtattcgtccagtgacggatttcctgtccactgctccagaatggtagcggctcgtttgatgacgggcgaaataacagcatgattgggagtgatgaacgcagccagcatttcgggcaggacattgagtccgccccattggtcataagcgagaatgtcaatcggatacgtttgcgagaatatagctttcgtttctgacgtgatttctactttcaggctgcctgataatctttcggtcagttgggtgaaataattggtggacaaggtgagattgaaagtttgcagacagacccggtcgttggccggaattgcttctataactgttggaacagcattaccaaaggccggttcggtggtgatttgcacttgtacatctttcagtggagcatgtgtcgtgttctcaattgaaatctgatgaataatagatgcgccgttctgctgcatcgcgaaattaataagcggcaaatagtcgcattgcaccttgactttgtccaatctctcgtccatggctagagctatataaattaagacttgcaatattacaaaaaataaggatataagcatcttttcttttggcattcttttggcaatcaagaaaatatttctacctttgcgcccgatttatagataatataatgtcttatttaattaaagtattaaacaatttatttattaatggaaaacttaaagaacgtagctcctattgaagatttcaactgggatgcttatgaaaacggtgaagcggtaacaaacgcaagccacgaagaacttgaaaaagcttacgacggtacgcttaacaaagttaacgaccgtgaggttgttgacggaaccgtaatcgcaatgaacaagcgtgaagtagttgtgaacatcggttacaaatcagacggtatcatccctttgaatgaattccgttataatcctgacctgaaagtaggtgatacagtagaagtatacatcgaaaatcaggaagacaaaaaaggacagctcgttctgtcacacagaaaagcccgcgctactcgttcttgggatcgcgtgaacgctgctctggaaaatgaagaaattatcaagggttacatcaagtgccgcactaagggtggtatgatcgttgacgtattcggaatcgaagcattcttgccgggttctcagatcgacgttaaaccgatccgtgactatgatgtattcgttggcaaaacaatggaattcaaagttgttaagatcaaccaggaattcaaaaacgttgttgtttctcacaaagctcttatcgaagccgaattggaacaacagaagaaagaaatcatcggtaaactcgaaaaaggacaagttcttgaaggaactgttaaaaatatcacatcttacggtgtgttcatcgaccttggtggcgtagacggtttgatccacattacagacctttcttggggacgcgttagcgatccgaaagaagttgttgaactggatcagaaactcaacgttgttatccttgactttgatgacgaaaagaaacgtatcgctttgggtctgaaacaacttactccgcatccatgggatgctcttgatcctgacttgaaagttggtgacaaggtgaaaggtaaagttgttgttatggctgactacggtgcattcatcgaaatcgctgccggcgtagaaggtttgatccacgtttcagaaatgtcttggagccaacacctgcgttctgcacaggacttcatgaaggtaggcgatgaagtagaagctgttgtgcttacacttgaccgcgaagaacgtaagatgtctttgggtatcaaacaactgaaacaagatccatgggaaactatcgaagaaaagtatcctgttggttctaagcatactgctaaagtacgcaacttcactaacttcggtgtattcgtagaaatcgaagaaggtgtagacggcttgatccacatctctgacctttcttggactaagaaagtgaaacacccgtcagaatttactcagattggtgctgacattgaagttcaggtattggaaatcgacaaagaaaaccgtcgcttgagccttggtcacaaacaactcgaagaaaatccttgggatgtattcgaaactgtatttacagtaggttctgtacatgaaggtacgatcatcgaaatgttggataagggtgctgttgtagctcttccttatggtgtagaaggtttcgcaactccgaaacaccttgtaaaagaagacggttcacaagctcagctggatgagaaacttgaattcaaagtgatcgaattcaacaaggacgctaagagaatcatcctgtctcacagccgtatcttcgaagatgtagctaaagctgaagaaagagctgaaaagaaggctgcttccggtgctaagaagacatctaacaagagagaagattctccgatgatccaaaaccaagctgcttcaactacactgggcgatatcgacgctcttgctgcattgaaagaacagttggaaggaaagaaataataagaagtatttccagataaataaaaaggcgttccggttattcgggacgcctttttgtgtttacggatatgatgtcgtatgaaagaggaactgaattttatatggataacagggatgatagagacagtctattgtaacttttttctttattctttgcaagattgaatctgaaatactctatctttgcatgaaatggaaaaatttgagctacatatattaggatgcggttccgctttgcctaccacgcgccatttcgcgacgtctcaagtcgtgaacttgcgtgaaaagttgtttatgatcgactgtggagagggtgcgcagatgcagttgcgccgctcccggctgaagttttcccgtttgaatcatatcttcatctcccatttgcatggcgaccattgctttggcttgctggggttaatttctacattcgggctgttgggcaggactgccgatttgcatatccattccccggaaggacttgaagaactgtttgctccgatgcttgccttcttttgtaagacgctgacgtataaagtactctttcacgaatttgaaacgaaagaaccggcacttatctatgacgaccgttcggtgacggtaactacgatccccctgaaacatcgtatcccttgttgcggattcctgtttgaagagaagcaacgcccgaatcatataatcagagacatggtggacttttacaaagttcctgtctacgagttgaaccggattaagaacggggcggattttgtcactcccgagggagaagtgattgcaaactcccgcctgacacgtccttcggctccggcgagaaaatacgcttattgttccgatacaatgtatctgcctaagattgccggacagataaaaggagtagatttacttttccacgaatcaacctttgcacagacggaacaggcacgtgccaaggagacttaccatacaacggctgcgcaagctgcccaactggctttggacgcagaggtgaaacaattggttatcggacatttctcagctcgttatgaagatgaatcggtattgctcaatgaagcggcggctatcttcccgcaaacgatattagcgaaagaaaatctatgcattgacgttgacggaggaactgcgcatgaaaagtaaaagacttctatggggtatggtgataggattgatagcttgtctggtagcctgtaaaaaagagcagcctcaatctccgatacccgattctccggcttccttgcagaagttgttcaatcccgcttatcaaatcagtacggacagcatacaccggatgattcgctcatatctggacgagaataaacaggttactccctgggactcggctctagtagcttattatcaggagaaagatgaattcttctggctgaatgattctctggtatccgataaaccggctacacagccagcagactctctgttatactggttaggaaatatctcgaaacatggcattcatccggggctttaccttacagatagtattcgtaacgatttggagcaaatacgtaccttgcaactgcaagggaaaaagacaatgaatcgcttgctggccgacgtggaatatcggttgacatctgcttacctgtcctatgtttgccgactgaagttcggctttctgcctcccgaacggaggtggaacgattcgatcgatcggattcctttaaaacgctgcgacaaagagtttgcattggcagctctcgattctctgcggatagatgcaaatgcggctttccgacgggcgcaaccttcctcccggttttataaaaagatgcaggaagaactggaacgcgtgaactcttggggcgaaacggatacgacagattattaccgaaaccgcctgctggtgaatatggaacgtgcgcgttggcaatatgcattggagaagggaaagaaatacgtggttgccaatacggccgcctttatgctgcaagctgtcaacgaagaaacggattccattttggaaatgcgtatttgtgtgggaagtgtgaagaataggactccgctgttgtcgagtaaaatctactatatggaattgaacccatattggaatgttccccaaagtattatcaggaaagagattatccctacttaccgcagggatacgacatactttacccgtaaccggatgaaggtatacgataaaaatggcacgcaggtagatccgcatagcattaaatgggcgaagtatgcaggaaaaggcgttccttatacggtgaaacaggataataaagccggtaattcattggggcgtattattttccgtttcccgaacccttattccgtttatctgcatgatacgccttccaagtgggctttcagtcggaagaaccgcgcagtgagtcatggttgtgtccgtctgcaaaaagcgctcgactttgcattcttcctgctgaaagagccggatgaattgttggaagaccgtatccgcattgccatggatatcaaaccggtaagcgaggaaggaaagaaattgcctatcagcgcggcttaccgtgaactgaagcattacagcctcgaacaatacatacctttatttatagattatcaaaccgtctatctgtcggccgataataatatgcggtattgtgaggacatttacaattatgatccgtctttattagaggcgatgaaaagcctgaatttgaaaccataaataaaaacatacagaaaacgagagactatgacaccttacaatgaacccgaggttctgaaacttctccaggaggagagtacgcagcggaaaggcttcgaaataattgtggcgcaatacagcgaacaattatactggcaaatccgccgaatggtgctctcgcacgaggatgcgaacgacctcctgcaaaatactttcatcaaggcatggacgaatatcgactacttccgtgctgaggcgaagttgtctacctggctctatcgtattgcgctgaatgaatgtcttacttttctgaacaagcagcgtgctacaacgaccatagctattgacgatcccgaagcgatgattgtgcagaaactggaaagtgactcctattattcaggagaccaagtgcagttgctcttgcaaaaggcattgctgactttaccggaaaaacagcgcatggtgttcaacctgaaatactatcaggagatgaagtacgaagatatgtcggagatcttcggaacatcggtcggagcgctgaaagcatcgtatcatcatgcggtgaagaaaatagagaagtttttagaagaagtagattaaaccttttaaaccggacaatgtctaaagaaaagagaggagaaaaacgtatgaaagaagaagatatcctattgaagaagctgggaaaggaaaattccttcaaagttcccgaaggttactttgaaaacctgacttcagaggtgatgaataaacttcctgaaaaagaaaaagtaactttgaaggaagaacctgtcagcacatggacaagactgaaaccattgctttatatggcagctatgtttataggtgcggctcttattatacgggtggcatcgacagaccataaatctgttgcgacagatgatgtggcagtgacagaagtagtggatactgaagtaatatctgatgagatgattgatgtggcactggaccgtgccatgctggatgattattcgttatatgtttatttgagtgacgcgagtgtagaatgatttattaaaaccgattgaatacagaaaatgaaaaaagtaatcgcattagtcgttttgttgtgtggctttatgcctgttctttgggctgccgacgggtgtgaccaacatctgtcccgtgaagagttcagggcgaaacaaaaagcatttataatagaacaggcaggcttgagtaaacaagaagctgccaagttctttcccgtttatttcgaacttcaggataaaaagaaaaagctgaatgacgaatcatgggatttgatgcgtaaaggtaaagatgataagacaacggaaagccaatacgaagaaataaacgagaaagttgccaataaccgtatcgctgccgaccaactcgataaaacctacctgagcaagttcaagaagattctttccagtaagaaaatatttcttgtacagcgggcggaaatgcgtttccaccgggaaatgataaaaggcatgaaccgcaagggtggcggaaacgattcgaaaaggaaataatgatgaaaaacagaggctctgtttcgtgcaaacagacgctctgttcaggtaaaatagaggctccgtttcactgaaacagagcctctgtttttttgtttataagggaggtttataatcctttcttttttgcttcattccagatcgcgtccatttcttcaagagacatatctttcaggtttttcccttctttaatggtatgttcctccagatagttaaagcggcggatgaatttctggttggtacgttccaaggcattgtcgggattgattttatagaggcgtgccgcattgatgagactgaacatgacatctccgaattcagcttccgccttgtccttgtccatgttggctacttcctcctgaaattcaccgatttcttctttcactttatcccatacttgttcccgttcttcccagtcgaaaccgacattgcgtgctttatcctgaatgcggtatgccttgattaacgaagggagggcggcagggactccgcttaacacacttttgtttccgtctttctccttcagtttcaactgttcccagttttcggaaacctgtcctgccgtttccgccttgacttctccgaatacgtgggggtgacggaaaatcagtttgtcgcagagcttgtcgcaaacatccttgatgtcgaaatctcctgtttccgagccgatcttggcatagaaagcgacgtgcaacaggacatctcccaactctttacagatatccttcttgtcatctctcatcagggcatcgcaaagttcgtaagtttcttctatcgtattgggacgaaggctttcatttgtctgcttacggtcccacggacatttgacccgcaattcgtcaagtatgtccaggaagcgtccgaaggcttccatttgttcttgtctggtatgtgacataatcagtttatttttttagaatgctgcaaagttagtttaatcctgctacacaaaagaaaaatttcttattaattatcggttcttccactcttgataggaaatcagtaatcctatcacctccgaatagtttcggcgaccgctctctatcttgttccctttcaggtaaaggtcgtatatccagtcctgcacagcaccgacgaccgggctgtatttggcggcccaatatgtctgattggccttcgctagttcgataatctccgggcggatacgtttcaggagtttcgcgtattcttctttcggcagcaatctttgcgcatttcccagtacatgattgagcacggagaaatatccggagaagcgaatgcccatggcttgcgagcgggtacaaacctgatatgcatagaaatttgcttccgcttcgctggtgataccaagcaggtgggctagttcgtgggcgtaagtagccggataattggccggaagtaaatctccgttgagtgtaaactcacaaaagaaaggtcccatgctgccggtgactcccaccattgaaataaacggagtaaacatcattgtttttactctcggggcatcatgtggcggacggtgaacgcccagactgtcgcttaactgtttgtatagccgtacggtttcttcccgaatcaaatcccggttaatactgtttatgggagtgtacgaacggttcagtcgggtaatatattcgttcacgaatttctgaaaattctcgggtgtgtaggcggtatacggaatttcggtccgttggtaaaagttcttttgagaataattcaatccccaggcaagatagaaccatacatacacccacaacaggtattcgccgtcgcgcagcaaaatctttttccaaggtgtcttcttgcgcaggcgggtgtagatcggataaataatgattccggcaatgctgagaaatataaatagatctcctatggcgaaaggaaacaggttcgaaaaagaggatagaatataggaaaagcaggggtagactgtttgcgaataaaacgtcgccagagcaggaattaattgagtcagccacaccaggcccaataatactcccagaactaaatatctaacatttggcttcattttcatcatttgtctactattggtcaacaaaaatatgcattaaataaacgtcgcgcgaaaaaatacctctatatttgcaaaaaatctgttaaccctcaaatccgcaactacgcgcctaatatgatacagaagcgaaaagaatctgcatcgttagtaaaaagggggcacagtgcatcgaatgtcaccataaagacatataaatgccccttaccccaccatgcgacttgaggcaatacgcaaaatcacgactataagttgtcggtgttatccaaagtcattctggaacacattggcataagcattgttgcatgaatagatattcagcacatacttccttgatgtcctgacccatttggctggcacagagatgaacttaaagacaaacgtcttgatgcggcttgttgctttgagtccgaacctcttcacgtcaagcctcgccatgatgaatttatagaagttgcgtatgagtgccataagcagaagaaacaccgtgttttctcccataaaggattttggaagcctgttccagccgaatccgttattcatatcatcgaagatgcgttccttccctccacggaggttatagaattcgacaatctctttctcggaagactcgtagtcatttgtaaggatgcagcggtaggtgtattctccttcccacaggtcgagttcgccgtctatccgcttctgtctttgaatcacaagacggtatgccttccctttccatttctcgatgagaatggaggccagctcaaactcaatgccgcccaattccactttcttccaacctctgagggcaaagatgtcattgtagagcgaactgcatcggttagcacggatatagaaggtcttgcagtgtttagcaatctcttccactatctcttcagaacacgagccgcaatcagctctgaaacggttgataataagcttgttttgttcaaacctttcaaagaacctcttcagcgtgtccttctggtggaaacggacatttgtgttgccgtcgctgttctcaatgccgacaatcaagttgccaataaccgccacgccagggcgataaccaaggaacttcttgtatgtaggcttcgcatcaaacttctcagcctctatgaactggtggtcgaagtcaacgtcatacccctcgccctctttcagctgccctgtggacaataggcaattgaggagcagtgtattcagcttgtctgccgtgttgaagtcgtaggtcttgccagtgtcggatgtgtaggaaatgttatcctgggtcagttcctttatggctctaagaatcgtgtcggcactgcatgtgcgaagtgtcggatgaagcgaaaggtggtacatcagatgagtggtgacatcctcgatgcatgagccgccacaaaaataaacgctcataagcgaacggatgatttcgctgtattgataaccatacagcctgcatctcataccgagggttgagtcgattacagatgagagtctggagtcaaattgctccattattgaaaatattcctccaaaaggagtgagtttctcggatttaattgctacctttgccatgtctgtcgggtttgatacatattttgatttgcaacactaagataggtgaaaaatctgacatggcaaattcctgagcaactttttgttgctcaggtacttaaaaagttatatttgtaatagtgttgcggaattaaggatcatctataatatagactttgtttgttcccttgaaaagaacacatcttgtaacagcgtgcggaaactttcgttcaggttgcttaccgaagaacatcgctgaaccgttctttgccgttccattctcggtaaacagttccaagttctcaaatatttgtttgtcgggtgtggacggacttagtttggcttctgttcggaaatccttaatcatctgttcgtctgcatccgtgtagatattgaaccagtggcagggaatatggtcgaaaaagattttgttacactcctgaaagaagctgcgcatttcttcggctgtgcgaagtttctgcgagtttgctccctcacggacatagatagaaccggaaaatatataaggtttatccttgccggacggaacatcaatcacccaaacagttttattcacaatatttacggaatacaattcacagtggagggcaggagatatttcgctgatagaaccttgaatagcagaacgcttatcgttttctaagttagtatctaccacttgtccgttatcatctactccaataagcaaatatcctccgtctgcattggcgaaagcacatatttcctctgtcagttcacgcacctttgaaggaacacgaaccttaaattctacattgtagccttctccgctatcaataagtgattgtatgttttcagtatttaacatgaattttatcttaacaatgcaaatttacggataaatcagtgaaaacaaaatagttgtcataaattccttttcctaaattcagagggtatgacgcctttatattttttgaatagcttgtttaagtggctttcatctgtaaagcctaattcagcagcaatctcattgattctcatttcgctatgcaataatctgttttctactaacttcaacttatatttgatgatgtattgttgcattgtttcatttgtatgctttttaaaatagcgccccaaataattttgcgagatgccaaaatgctggctaatagtgtctgcctttattttatcgggattatatatattgttttggatatattgcaaaatatctaatgtcttttcctctgaacgttcatcaatcttttcaggcagatacttggctatgttacgagtaacgatgactatcaacgtatttattaattgttgtatcagttctttgttatacaaatcttgatttacatattctcttataagagcttctattatagactttataagcggtttatccgtgatgttttttaagatacaacccggttgatgattggcatgttgaagaataaattctaagttcttaatatttttagttccaaagaaaccagaatgaatatatatatcattaaaacgaatgaaaaagaattttgtagtagtatgaatatcaaaagaatggcaatcttgaggggttattagaaacatatgtccctcatgataatcaaatttattattattgatgcattgtaaacctgttccggaaaggatataaactaattcaaaaaatgtatgttcatgctctttaagaggagattcttcgagctcttttacgctgatttcaaacggctgatgtagattttcctttttcatgttgcaaatatactgtatttaggaaaatatatactaaaaacaaagaatgaaatcggtataattttgctctctgaaataatcttttaaattatatatgaattatgaacttcttagaattagtaaaagaacgccattctgttaggcattatgcacagcaagtggtagaaaaagaaaaactggactacattttggattgtgctcgtttggctccttcggcagtcaataaacaaccgtggacatttattgtagtacagagcgattcccaaaaacagaaattagctaagtgctatccggcaaaatggtttacggaagctcctgtatatattgttgtctgcgtaaatactgatattgcatggaaacgacagtttgataataaaaaccatgctgatattgacggggctataactactgagcatatttgtttagcagcagcagaacaagggttaggaacttgttgggtatgcaattttgatgttgcgatgtgtaaggaaaatcttgatttagaatcatatattcaacctatagcaataattcccattggctatccaatcagcaaagaacatcaactatctacgagaaaggaaattaatgaaattgtttcatatatataaattaggaaatgaaaaagaagatattatttgttgttaccagccatgatagattgggaaataccaataatccaacaggttattatttatcagaagtaagccacccttggtctgttttgataagtgctgggtatgagatagattttgtaagtcccaaaggtggtaaagctccagcagaagcagtcgatttgacagatgaaataaataaagcgttttgggaaaactcggtttatcgatttaaaatagagcatacattaaatccccaagaagttaatcctgtagaatacattgcagttttttatgctgggggacacggagttatgtgggattatcctaataaccaagatttaggaagaatagctcaaacaatttatgaaaatggtggtgttgtaagtgctgtctgtcatgcgccagcagctttattgaatgtaaaattatcaaatggagagctgttaatcaagggtagaaaaataaatagtttcacgaatgaagaagaaaaattccttaatacagattcaatagtaccatttatgcttgaaacagaactaaaaaaaagaggttgcctttttgaaaaatccggtttgtggaagtcacatgttatagtagaccatagaattataacaggacaaaaccctcaatctgccttagaggtgggaaaagctattttgcaagaattagaaaatctataaaattgaagcaatatagtgagtttctttattttaggataataaggaatactcactatattcttagttatagcaattaatatgaataaattattacaacagaagttttttcgattattatcggaatattctcaacgtaaagtttctgcatccgagttgatagaagctattaatgaattagcggcctatgtagccgattttagtattaatgagcaggattatagcgtattactgcgttatttcttctttggcttgcatcgtcttaaatcgtaccgtgtgcggtttgagcaagaaaaaaatgccctatttgcacttaattgatgaagcgataggaattttaaacaccgaaattcgccttatcgaatggcgtatcaagtacccggaacagctacagcaacgtgctaataagcaatctctttcccctctctttctcgctgacaagacaacccttatcaacatcatggaaatgataagcggtctgttcctctccaaagacatcgtgtatcagaacggcaagcccgcctacttggtggacttggcgaaagcctttgaatggctgttcaacatcaggataggcgactgttaccaaaaacatgaggacgtgataaaacgcaagccgggcaagctgacagagtttcttaatggactggcagaacttatcaaaaaggaacatgacaagaaaggatatagataatcagttacttatgatttatttataggggactccattagtacccctataattcctttgcgcctgttttctgaactttgcttcatcaatcgattgacagaccataatgtataatcagaaaaatgaagcaatcatgtatatagagaatgacgatttcagcgtatggatgcagaagctgtacgccaaactggaagaactctgcaaggatgtacgtgtactgcgcaatgccgacagggtgctgcccgaagatgacaacctgctggataatcaggacttgtgcctgctcttcaaggtgagtatcaagaccctgcaacgctaccgggctatcggtgcgctgccgtatttcacaatcagcggaaaagtgtactacaaggcttccgacgtccgggagttcatcaaggagcggttcagcgtcaccacgctacgccagttcgagaaagaacacagcacgaagaaaaagaagtgaattaaaaagccggggcggttctgctccggcttcgctttgggtttatggcttgcctaatttgtcggcttcctcctttagctgctcggcttgctcgtttaacagccttgcccgttccaacgcttccgcctgcttcctgctgcggtattcaaagcctttcaccgaatcggtcaggcttcggatgaaagcgttgtcccgttcccggctgaacttcgtttccagcaaatcaaggctgctgccgtctgcctttcctttcatcaggatatagcggtattttatatcgttgtcctgtaaccgctgtatccgttccgtgaaacgaatattcaagattagcgaagcgatacagataataaaacctgctgaaagaagaaagaacttgggtttcaggtaaggagttatccggtatgtcagtttaccatgccatgaaatgggcgttgtttccccggtcggaggtgtatcatcaaccgggaacaacacctttaaccgttccttgaaatatcggtgcgaggtcacgataagcccctttatatcttcaaggtcttgtttttggttctcaaattgcccttttccgatactgccgatttggtttagaatctcccgtaccgtgttttcagtaatgccggatttaccttgcatttccgaaatgcgctgttcgataacgtccagtcggttaatcgtttcctcccggctggctggcgttacctgcttctcctgccgttctttcagttccgtaaccatagagagaagcccctccaaaattaagttattttccatgttcctataattttaagtgtcgtttctttttcttcttttttctttcaccgggattgtcgggcgtttcatcagccggagaggacggggcggagaacagaccgcctaagcctgccagtagcggactgtcggctttgcccggtgtctgcgctggctcctgaacaggtgcggaaaccgtctgtcggttgctttcggtagtgttcagccccgcatccccgaaacatttatccagcttggagaaactgaaactgcggtctatctccgaacccttgaacgtgtattcacctttggaaaaggatacgccctgcacttcgccagcctgtcccctgtacttgaaatgaatcccgatacccttttctgccagccgggtttgtaactgctgccagttccttgatttcccgatttcattctttatagcgttgtaaatctcgtatttggatttgtccggctctcttaaacggtgctgctttacatgttccttgcctttagcgaaataaagcccgtgtttggctttcagcttcttgcatacctgctcgttgcggtacatgtcgttcctgtccgaaatggtcttgccgttgttgtctatgcggttgaacacgatatgcacgtgcggatgttcccggtcttggtggcgcacgatgatgtactgcgtatcagtgattttcatttcacgcatgtactcctgtgcaagctgttccattttctcgtctgtcagcttgggtgcgtccaccggggaatagcttagcgcaatatgtccgacaggctttttcaggtcgggattcatcccggcttgcagtatgaaactgcgtatgatgtcccggttgctttccgctaacactccctccacatgaagcaaggctgcctgttccttgccaagcacatagttcacacagcccttaaatccgcttcccttttttatttttccaatcatccgacaaccggtttatgatttcaacaatcctgtttttgagtttcaccagttccaccgctaccagtgcgaaccctccggcattcgcccggtgcgccagctggttgatgttgttggcttcgcccgccagcttgcggatagtgtccgcatcctgcctgttcagccggggcgtcacctctgccgaaacgacagcctgccggacgtattcgctgacacgcagcccggcttccccagctcgcttcctgattgcgtagaactgtaactcggtcagtttcgtgctgactacccggttctgcttgtctatccggctttttgccgggcgacctcccggtttgtttcttatccctgtcatacgtttttgcttttaggtggtatcttagaaattgcgaccaacgggagaaattttctttgctgtcaagcaaagcaaggtgtttcggtctaccgaaacataaccttgctctccaaataaaccgccagccgttgatagtcctgccggattaaatgcccctgcctctcttttgtcttggggcggtacgttgtccggtttcctgcttcgtttcctgcacttggctggctgcgtttttctgttcctgcttcctgtcgcacagataatcgttcaagtccgaatatcccctataattgtgcgagaagtcacgcacacggtaggaatattccaattcgatagcccgtgtcgcttcatatccagctttgtcattgtcaagcatacagtggatgcgttcatacgggtacaacgcatcaatggctttcggcacgttgacagttgaattaagaatgacatagtcctgcctgtcaaggttgggcatggtcggacagttcttcatgcggagcgtaaggaaagagagatagtccatgaatccctcgaataccaaacacttctctctcggctctcccttttgccttatatgggtgatgtctttcgatgtgctgcccttgaaacggggattgcgaagctcgtaatctcctgaattattcctgaatgccagcgcaaaataaggctttccaccgatgcggtaatacatttcctgcacgtatggggctgccgttccgggggaaatccccctttccagcaagtagcgcatgagtgccggattctgtaacggctgtattctgcgtacctctatcgggctggctgcctgccttttcgtgtccctttcgggcaggtctttcccgtgaaaggaaaaagaggcggtgtcgtcctgttccagccgacagatagcaccgtaggcgttgcacccgttctgtttcatcacaaggtcgatgagcgtcccgccctcgccagttccgtagtcacaccatagattggcgttataatccaccttgaaactcggtgtgttgtcctcccgtaaggggctgcggtacatcccgtaacttcccttttccgtgacgggctggattcccaaagagttcaggtaatccttgatactgatattgttggcttccttgtaggtcataatctttatttttttatttaacgatagtaataatgaagcaagaagcgagtaagaagaagcacggggcactactacatctatctttttctttttcaacggattgtagtacatgtagtaacatagtaattatttatcctttaaaaaaggaataaatatattctatatatcatattgccgttttttctttttcccggattttccaaaagtttgggattctatcttacttcatactacataactggtaaactgttgtttattagattgttatttgtatatcagacaatatgtagaagctactacattccggttctacccgtaatcatcccctgtacgggaagccggaacgggctttatcctgtacccgtataccggataatggttgttgttgatgcgcttctgtacccgcttgaaaccgattttccgcaatgattcgcccagccgtttttcggatagctggacgggggatatattacgcaggtatgcgagtacctgtgccgttgtcatgaagaacagggcttcttcctcctctgtcggcttctcaaagtattgtgtaagcatctcaaactcgattgtctgtacctcaaattccgcatttgtcaggtgcagttcttcaatctccgcatcattgaaccagtagcgcacgccctgacggtagaggtacatgatttcggaatagacgttatccatgcggatattttctgccgtgggcttgtctatgtgcagtacctcgaacggcaaaaaacgcctgctgcctgtcgggtcggtcaggaactcgttgccgttcaccgaagccatgaagctggcgaggtgggggtattcctcgatgtaaatatcatacggtctgcggtatttcaccgccggggtggtgataaggttcttcaatgcgttctcgttctgcttgttgagttcctttagctggtcgtcaatgttgatgaacaggtattcggctatcagtgtcaggatgtctttgccctgcgggtctatctttccggtgaacaggtagttcttaagcggtgtcgggcaaaggttgtccagccaccacgatttgaactgcccctgcctgtccccggtcagtaccagacaggtgtggttctgacatcccgtgtcgttcatggcgttggctaccacaccgacaagccatttcgtgaaatattcctcccatttgccggggttggctacctgtaccgtgttcagaagcctgccgatatgcccgtgttcggcaggattgagaagcggcagggcgttgaaatactcctgtatggggtgagcctttcttgcgaaatcgctttccagtatcatgcgtatgttgtcggtcgaggtggctatgtcagccgttgcgtccagcctgcgcctgaaagtgttcagggcgaattttgtaacgggctggtacaagcccgaagagcccgcagcccggtattccgtccggctctttacggtgttgaaccggaaatcgtacaggacgttcaacaggctttcgatgcgctcgttctttgactgccagccctcgatatgccgtgtttcatcacttcttttctttttcatcgggaagtctgttagaagccgggacatactgctgttgcatccactttttgagttcctccatgtcaaaacgcagggtacgcccacgcttgacacacggtatcatccccttgccggctaaatgatacaggtaattgaccgaatacccggttataccgctggcaacggatattttgactaacacaggctcttttccgtcctgccgttcttcgggctgtacgcccgtgactggggcaatcatcttttcgatgttctccagccgtttgaaaatttcttcgaaaggattgttcataagtgcttattttttgaattagcaccacaaataaaataagaaaaatcggtaaaaaacaaagtgtcagccgtttggaatcgctttgcttcgctctgcaccaaattaatgtcggcaaatagaaaacggctttgtgttcattaccttacttatttaaggagtggagaaaaaacagtttttttgttatcggttcgtttctttcatgttgtttttgggttggcagtggacattttcggacacgcaaggtcattttcggacagaggggaacaacctattattcagccttatatatttgcaccagtgaagaaaaacggagtattgacaagaataaatatatcggttatggaaatagttacgattgaaaagaaaacttttgaactatggaaacagaggtttgaaagctttgtggggcgtgtggatgcgctctgcgtgcctttacgcaggaagcgtgacaagtggctggataactgcgagacctgccgtctgctgaatgtttcagcccggacgatgcagacctaccgtggcacggggaaactgccttactcgcagataaacggcaagatttactacaaggcttcggacgtggaagcctttctgctcgaccaagtaagggacaattctaaaaagtaggcgtatggatttgataacgaaagattccgaaattacgctggtactgttttcctccctcgacagggtgctggaaaacgtggagtacgtggtaatgaactatcgcccggtattgaacggtgaacactacctaacgggcgaggaagtgtgcaagcggctttgcatcagcaaacggactttgcaggattacagggacacggggctgctggggtatgtgcagcttccgggaaaaatcatctaccgggaaagtgacatcatggatttgttggaaaggttctatcagaaatgaaatcttgaaaacatgaaatcttgttttctgtatttattgtttgattaattgaaagccagcaatcacggtttcttgaaaactgtgttgctggctttttaattattcaaaaactattcagtaacaaaatgctttgtagaacaatatgccttaactcccattttggatgtagtgtgtaatattaggataatggcaggaactaaaatggcaggtgtcattcctataattggtgataaccaatttgatagagcagtaacacttcctaaaccgatggattttcctgccgctaaaaatttcttttgttctttttcataatcaggatgtccacaaatgagtttgtcaaattcatcttttagtctgctccaatagttttgggcttctgccgtattggtttgactacctccgaatgttgctgtttgaatgggacctctcgctgttaaccattcctcggctgctttttcttctccatatttagatactaattgttcaataacaactttttgatatggtttaaggcaagcataccactcgttaagtgataaatcatctatttctatcataacatttcttttatgtgatttgcagaaatacaataagaagtttggtttaactcatgagggtttattccggctataataactcctgacgcaggcgcataagtacctattaataagccaacaattgcccctgtcctaatattaaatactaaagaacctgattgtccaggtcttgtttgtatattaatcgttgcatattttgatttgattccggatgtttctaataacattttagctccaatttctgtttcttgatatgttaacactcttctgcccataacacaatgtggaaatccaaacataccaattttctctcccacaggaatgttatctaatgattccaatggaggtaaattgccattaaatcctaaatccgtttttaatatgcataaatcagtaattggatttatatcttcaataatagctgtggcaggacgacatgataagtctgttacgtcttgataaacatttatattcggaatatgaggtaacaaaacgcataaatcatttgtttcatttcctacaacatgtcgtgctgtaactactttaccctcattagaaataaggaatccggttcctaacatgtcaattgcatgagtatttttattgtatttccctattacaagtgttatttgtgtaaaatcaaacatggcttttatatttataatgtttctattgtcaaatttagcagaaaaaactcatatatgcaaattattaatttgtttttcaacttcttgcatatcccttaatatcgtttggtctaatacctttgcataatgctgtgtcattcgggtggatgaatgccccaacattttagccacgttaggtagtgatacgttgttagccagtgcgataaccgatgcgaaactatggcgggctgtgtgcgtggtcagtttctttttgataccgcacaagtcagcaatctctttcaggtaactgttcatcttctgattgcagggaacgggcaacaaagttcctttatccatgcagtaggggttatccttatacttttcaagtatctgtttgggaatactcaaaagcgggatgttacagaggttgtttgtcttttcacggggtttcactatccacaggttgccgttgttgtcctctgaaacgtgttcggggcgcagattatacacgtctatgaatgccaaccccgtatatacgcaaaagatgaaaacatcccgtaccagttccagccgttcaatcttgaactctttctgccatatccggtttatctcggcttggcttaggaactgtttgtttacctccacctcgtgaaacttgattccggcaaacgggttctttgtcagccactcgttggcaatggcaaggtttatcactttcttaaaacatttcatgtaccggataacggtattctgtgcgcaatgcttctccgtctttaggtataaatcgaatttgcgtaccagttccccgtttacctcacgcagtaacatatcatctaccttgtaatcccgtttaactagttccatgaggtatttaaggcaattgtcgtaacgtcttacggtgatgtcggcatagtctgtcccgattagcttccggcagttgtcattatgttccttgaatacattatacaatgtcttgaaagtttcgtcctttccctgatagcggttcactatggcacgtgcggagataatctttccctccagttccaagtcttggtaaatctgatagaatttcacacgcagggcgtcaatgtaatggttaagttctacggagtttcggtctttgcctgtcgacttctctttttcctgcgaccaaagtgggacttttacactccgctttagttgaagttccacgtataggcggtcataagtgacacgcacacgcacgggtgcttccccgttttttaacagtttgctacgcttgatgaagaacaacacgctgaatctttttctttccatacggctcaatttttaatgatacaaagttaggaaatcgaaccgagaaccctgttatgtaaaatagtgcaacgtgctgtaaaagaatgaagtaaatacctcgcagtggaacatttcgggcttttaaaaacagtcccttgaataaggacgtatggtttgcttcaatcccactaattttgcctattcttggaaaaggaaaatccccgaacttctttgaaattcagggatttacatcgttttgccttcttaaaaagtggtgccaccaggaatcgaaccttttgcttcggtttattctaactccttgagtgactgcacattttttgctttatcttttatgaaaaccattgaattggccttacgctaaattcattgtttttctttactaatctgacaaaatttgtctctttgacactgcaaatataatacacaggttcgatttctgcaaatattttcattccttttaattatagttttcaacaagagaaaaaaataaaaacatgtgctaaatcaaatgcattaagaatttatttattgtttggggtgttgactttaaagttggaaattttgcttcgcaaatcattagaaagatataccccttgaatctttattttgcatgaataaaccaaaagcactaaaagagcaaaaatacaaatgacgactatttcactaggcgccaaaaagtttggaactgacttgggcatgaaggcacctgcaaagagatctactaaacataagattatagctcccacctttcctaaagcactctttacctttcttgatttttgtatctctatatcgcttacaatttgtgcaatcacagtattattggttttcattgcatattctttcaacgtaaatatcgaaacttcttcattattaaatagaaaaatatatttcccaattaagggtactgctagtgtacataatgcaaagaggatacaagtaaaaaatttcacagtccaaatacagacaatacctaatattacgaatggaatcaggtttattagagttaaatcctgaaacgtaattccaggttctttttggggacaacacacacctaaatacaaatctgtaaacaccaatagaataaggaaatttgtccatatatccgtatcataaatcttgtggttgtcaaataacgcaatcaaatctttcatgttgttcataaatacttttttaaattaatagtttatagtaaagcggcagtcaacattttaaatttccactgtattaaaatagagcctatactgaaaaggaacagggctattggttatcaataccctaaaaccttattcgatataatgtctacagattataccattcaaatatattatgtgttattggattttacaaatatacagatactattcagaatgtcataacttctccataaatattattttgtacagtttttttacttataattcatgcctttatcatactttgcggcattgctgcatgaaggaggtgtgcatgccaaaacagaaaagtttttgagccattcatgtaaaaaggatatacaggatgtcatctgatgacttttaatgacatctgatgacactgctttttatgtttcggatataaagcggttctttgtcgtgtattaatagtgaactaatccatgaaaatgagatgccatgaacatacaagaagcaaagaacatcaggcttgttgattttttagccggattcggatacaagccggtaatacagcgtgggaacagcgtatggtacaaatcgcccttcaggacggaaaaggaagcctctttcaaggttgacctccataaggaattgtggtatgatttcggtctggggaagggaggggatattataacgttggccaaggagatttatcggacacaagatataggttatgtactacagtgtattgaggataaaagagccgtactgaaaccggttactgtttcctgtccgtttgaaaaggcatatcccgcctttcaagatttgaaaatcattcctcttgccaaccggatactgcttacttatctgaaggaacggtgcattgatctggaaactgcccgaaaaatatgcagggaagcccattttaaacggaatgggaagaattattttgccatcgctttccctaatatttccggagggtacgaaatcaggaacaggtatttcaaggcttgtattgctcccaaggacatcagtcgcatcattagcacgccggaaagcaggatttgctatatttttgaggggtttatggattttctgtctttcagaccggcttttccatctttggaagagggggattatatagtgttgaattctgtcagtaacttacagaaggctttttctttcctttcacaatatgacggcatccgttgctgtctggataatgataccgccgggaaaaatgcggtgcaggcattaaaggacaaatacggaatccgtatatgcgatttttcgcatgaatattccggatataaggatctgaatgaatatttgtgcaggaagaacaatctgctccatatctaatagatgtattgaaaagactgcctgatgatatacccttgtttctttcctgtcatatgtggcaggaggaaacaagggtgatttttcatgtggtgatactatgttaatagtagaatgtggtcagatgcgttttatggtcttttacaatctttacttcatgcatctgtccgtatatctcacgcatggataccggacaatccatcttttcccattcttccggggaaatcctcatgtcggaatgcctgaaacacagcatgaccatttcctgagaatcctcttctgcgaatatggtaccttcatggtcgttgacaaactgtttgagtccatcctcatccttacaggatatttctccgacgtacatatcctcgctcggccgggtgtttttgcggatatggattttgaaccattcccggctttccggctgttcaggtgcgccacactcccacagggctattttcgcatcgtagtaaacctccccgttttcacatgccccgtaatgcccccaatgcttgaaacggccggtagtccatgccttgaaccttacatcgcctgcctttaccaacagacactcaccgccatgcatatcgcatttgataccctctttgtcacgggacacgaatggaacacgggaaaaatcccggagtataatgttatctccatatacggcatctataaagaacagccgggaacgctcaccataaccggaaacaaagaacaggttgtctcctgtccgtggatactggccggagcgtgtcttttcgatgtgttccaccatggtattcactttatctatatcttcctgtacaagtccatatatccgatcataccagtagttcaggcggatgaaagtttctttgctatacttgtttgttgtctgaatcataatttccttattttgtgattaaacatttccggctttggcaaagccggtatttctatctcttacatgtcagacatttgtcttttgctctgatagtgcaaggcttggcgaaaaaataccgcagcgaagcgaggatgattttttcagccaaccagtccgaaggaccgccttgcgcatcagaagcaaaaggctacctttacatgtaagaaatagaaatgctgaccgatatatgattccaaaataaaaaaacgtataatctgccggttctgtaataagaaagccatgaaaccctctctttttatcgtttccatgactttcttatgtttatgtcgtgatacttggaaacgggtattaccaatgatcaaatgtttccaccctgtttttttccaacagaacaagaatgtccttttccttatataataatttgcctcctactttgtaatagggcagcctgccgttcattctgtaatcagccagcgtccttcgtgtcagcttcaatttctccgccaactcgctgtcggtaatgtaacgctctccgttcaggaccggacgaaggtttttctcctgatcatccagcattttggacagggtgcttatgttccgaaaaaaacgtataatctcagggctttctttggtcagtatgaattgagtcataaggattcgggggttacatggtgaatactgttttccaaataacgtataatatcctgacgcctgtaatataccttgcggtctatatggctgtaagggataatcctgcttctccgaagttgcaacagctttcggggcgagacattcataagcatacacgcttcctggttatcaatccagtcatccatactacagatgcctcctccgcatgtttcacgcattctcttttcaacggcttccaaagcctcattcatttccatgaatgccttagcttcgatacatacaaattccataaactctgctttttttgtccggcacgaaaatacgggaagtaaaagtcatgggcaaaaggatgtcatcaaacggcatcagatgtcatcagatgtcagagaccgctctgtttggggaagcaaattaaaagaatggctaaaagtctgtttctttaccggaaaaacagtatttttatcccggacaatctgtccgaaaataaaaaaacaggaaatatggaactgataatcaatgcaacattattactaacggctatcgttctctggatatacggacaatactggagaaaaaagtgcggcaaggtgctatgccaatatgcagcagcctacgatgagcgggaagacagggagaaaccgctacgtcaagccatcatagcaggaaatcctcatgcaccgctgttatatgcgctgacttgtcctgagctgtttgataaagtccgtccgttgcgattgttctcattcgggagcattcgctgcgtgtttgccggctattattttcccaaacgctttgaaagctggctttgtgatgaccagttggcattcgtgcaaaaagtatatgatttcaaggatggaaaagacagctgtacggaatatttttcacaagcattcctgcttctttccactgatgaggatattactgccatgtttatgccgtgcagcacatcagaccgctattacagacgtttctcaggtattgccggttttctggaaacgcatggctatgtccgttcaggactggatttaatatgcattacggaaagcagggagtgtaaacacgcctcagaaaaacgctctgaaataaataccgccaactatatgatgtcaaacgatctgtacggaaagcgcgtggtgattgtcgatgatttgctgaccagcggatccagcctgatggaatacgcccataatctggaaagggccggtgccaaagtggaaggtgctgtatttcttgcccgtacctttcagatgccttcgccggcaaaagtaaaacgcctggtatggaaacgccatctatcagtcctgatccggagaaggtctgacgacctgtaaattgtaaagtttacattcggattttacaattttacacctcgaatttttacatttcaatttcccctatactatttttatatctgtattttattgatttgcagtgttatataattccccgtccaatataaacggataatgtggcatacatttttcactgaacatggcatatactcttgaaagtgcgcacaagaaaagggtattccagtaataacctttaaaaagacaggagaaaattgccatgatgtatatagacaatgaagtgcttgaaaaaatgataatgaccatagtggaaggttttgaccgtatagaaaagaaactggacaggatgggacgcgtgaaggactgcctgaatggagacgagcttttggacaactatgacattgccaaactgctaaacgtgtcattgcggacagtcgcccgttacagggaaaaagggctgatccgttattaccagacggacgataacgggaaaaacttctacagaagctcggaaatacaggagtttttacagaaacgtgggaaaaaagataagggcgggaataccaacatgggaaagttatgctaactttgtttcataaacagttgttatgaagacaaatgccaattcaagatataccgttgcagtccttattgacggggataacgcatcctttgagaggatggaagatataatgggctttgtttcccgttacggggatgccgttgtgagacgaatttatggagactggacgaggaaagcgctttccgcatggaaggaaagtgccagggagcatggattcaggcttgtacaagcttcctcccatgttcccggaaagaacacgacggacattgcactggtcatagatgcgatggatattcttcgggacgggcaggtggactgtttctgcctggtggccagtgacggtgattacagcctgcttgcccaacggatacgggaagccggggtgaaagtgctgggatatggggaaggaaagaccccggtgtcattggtacggtcctgttccgtattcctgtatgccgaccggaaggaaagcaaggcagaggagaacactcccgaattctttatccgaagggatatggagtatttcgacaaggcttttgagcaggcggctgacggcaaagaagaggtttccctttcactgatcggcggtgcattgaaaaaaatgatgcccaaattcaaggtcaggagatatggatgcaagacattgggcaaactctatgaaaagttggaccggtatgagctggtcatgacggaaaagggagtggcaaatgccgtacggctgaaatattaaaccgcatagcaggagtgttccaaaacgtcagtttctcctatacatcgttttatgtatcaggagaaactgacgtttgtgttctataccgggatggggtttacccgtaatgtgtcaagattgagataggctccccggtagaacgttcttccttccctgagcatgcgccacaggacgtcgcatccgatttgtgccaacatggaattgatgaagagatcctgtttttgcaatgcctcagtcagcgagcagctcggtcctgaatccttctccctgatggtggaataagggacttcctccgttatgacgttcatcttgggtataggcaggtattcagtggaggagggctgcggtatcttgcttttgacattacctatcagtacttgtccggtggtctgggcattgccgaaatccatccagtatatcggtgatttctcgtcatcgtatgaacgttccctatgctttttcaaaaaacgccacagaccggtccgtgaacgggtggtgtccgtgcaggtgatgatgatattcgccaaaacggaatctgatgttcctgacggatagcattgcccttttgcttcccatgaaaagccgaaaaagcggttgatacgggttacaagtgccaccgccttgttcagtccgagctcggattcgctgaacaactggcgtccgatgttcgcttccgtgacagtatcggggtcaaaaaccgtcaagtgcaggcccggatgtccgagtgcctgcaatgcgatactcattcttgccagattggtggccacctgcgatccggttccgcccgcaccgattacgaaaacggttacgggatggtggggattgagcaggtatctgtctgtataatgaatctttttcatatcaataagtctttaagttgtctgtccataggtttcaattcgttatagtcaaacggattggtccgtgccttttccgtcaccgaaaccagattgctttcggtgggattcctgcttcctcccaaatgggaaaattcactgagccagaagcgtttttcccaatgctcaaggagttttgagaaagtcatgttttccggaggagtcaacgaggcatttcccaggcagacactgcttcccgttacattgaaaaacggggcaaggaaaagcgggctgtcttctgccggtgcttctcccttataggcaaaaatttccagtctgtcaccggaagccctgtaaatgacaccgggtacatggaatgtcccgtccggaatattcagcctttcggaaaagaacatctgccgttttcccggaggattgtaccagatgtacctctcgtgtcccttgcgtgtatcgcaccacagcatattggtggggattttcccatgcggtacatcctgccggttatccgtatagtattccacaagggagtccataaattcatacgtaacggggacggcagcctccatccggcctctgtcgttgatcggatgcagttcgagataatatgtcccgtgtccatagcggccatcactgtattcgtaagcaatcagtgccgctttgggaaccatcacctgttgaagtttcttagtcagttcattcatgtcattcgttttaaaagttgtcatcaatatagcctgtaaaacacaccaaccatctggaaagcctttccggatagtcatccatctgaaaaagactgtccgtttccggtgtcagtagcttgtaagtgaccggagtaagggcataggtttcctgataatccgaattcatataccccttgacacactccgccaatgtatcatcagcagaatagaccagtatgacctggctttccattcccaccgggggaaaatcgcattcctcttcataagcccaatcgtactggtagcctgtcaataccgggctttccggagtaatcaatgccatgccgtcctcaatcagttccaacagcttcagctctttttccttttttgtccggtaattccgcacagcctcctccaaagacttgcagaacggtttgcccgacatccgtctgagtgctttcatccgttttccagactgataggaatctgccagccgtttgttcgccctgatttccttcggggaagcatcggaatcccggtttccccagtcttccagttcttctatggcaaagtcataacaaaatgtctcagtaatatcgtacagtctgtggtgtcggacaaatagccggatgaactccctgacaatgttcttcaatgatgccgaaagccgttcggtaaaatcaaccggaatccaaaacaaagtaggttccggccagtcatgatggcggaacagacagaaatgcagccttccgtccttcttttccagattgatacactccggtacacactcttccataactctgtacaactcggtaatattcaggcgggggcaaccccctttcctgtatcggaaagggagttttatacccataagttccgcatatcttgatgccgaccggtagagatagtcaaaattttccggagtcgtgagattgaccggagaatcattatccatatcctgatgccaataatccggtgcaaggggtgtgattctaccggtcagaaaagcattgtgcttcccggtggcagaagtatccttcttttccgttccgaggttccccttcggatgtgggacgaacttactgagagaataatcagccgtgccagtccatccttggcttgttctgaaagctgtctgcatgtttccttatccttttttttcttgttcataccgcttaccctttcactccgatggttgtcttgaagcggtaaaccgccttgtcgtcctcccactcaggaccatgtaccgttgccgtagtcagttcagggtaggtcatggaatagaagtccatcacctcgtttacggacagttcgctgttcggatcatccaacacgagctccacggagtccttcttgaatttgaatactctctgcaatcctttgatttcaagtgccatattatttttcttttatagggtttaacaatataccatatccatttgtgccatatccgtcatgcggcattccttcggaaagtccggatattccgcataagggtcctccctgagtagctcccggtcatcctcgtaatccttgtcgaagttatacattgcagcctcctgcaccgttgcatactgtgacggagccggttgttgcatccagcgattgtccgccaattgcggttgcggcacctgtaccggttgatggaactggatttcttgcggttgtggagcagcctgctgaggaaccggttgcggtgcaggttgcctatattgtacgggctgtacttgcggctgtgcaacgggttgcggagccggggcaggctgttcgggcatggacatcggaacttgctcttcgctccggtattgtggcgtctgggctgccatcggttgtggagccgattgctgcaaggatggctgtggatcagttaccggcggctgtaccatgtcgaacagacttccctcggatgccttcttctgcacttccgccatttttttgtcaatgtccgcctgtttgtccggctgtgccagtaccttagcctgcctgagccaggtcaatgcttcggaataatgctttcctgccgtggcatcctcagctttcttcagcagtttttccatcttttcccgtttttcacgggcttccttggactccttttccaccgtaggcttggaggttttgctttgtgaaaccgcctgctctgcctgcttctcgaacgattccaggttggtaaggataccttgcgctttctgtacgggtgcaccgacagcctgcaggaatcctgcatccagttcttccggcgtaccgttcaggatgagcgggacaatgcgttcgccggcctttactcccgaccgtctgggaacgacggcaaccgtcagattgtcgtttacccgtctgatgttgatactcaggtctgtgcctgccgtaatcatttggttgattgcttgaaaaaacataatggtaaaatttaaaatgttatacataagtttccttgaaaaaatccttcaggattctctgcctgtccggattcgaggcgatgcctttcaacggttccagatagtagccgatacgtctgggcccgtctgtcgtacagggaggctgtcttttgacaggtgttgtccggtttgtggcaggccatgcagccggcatgaccggagccgaggatgtaaatgtgtaagttctcatatcttctgcatttgatggttatacaagcatgcccatgacaatcaggacaaggattgttttcaagacaaaggtgaatgtcctgaaggcgagacggaccagtgttccggacataaggaacaggacagacaggtacacgggaatgacgcccttgcagtaaagcaggcatattcccgtaagcagaaccagtgcgaccacttgcctgcagatgttttcgatgagtttcagtttcatgtctttaaatttttaagaatgaataatcccatcgggatatgttttcccgattttataggcctccggcccttggattgcctttttgcgcaaggcttggcaaaagaaaataccgcagcgaagcgaggatgattttcttttagccgaccagcccctgaaaggggccgccttgcggcaaaaacgaggcaatccaagacctttgccgcttaaaagcggaaaaacgtatcttgtacatatataaaaaagaggcacagaccccagtctgcacctcttctgttccgtaccttccgcccagccgtctatatggaaccatgcggctgtccatcttccgaaagtttccggaaaatctcaccggtaacctcatttaccgtttccaatacgccatccagaaattctttctgtgtgagttctccctgttcaatccgtgccagctccgcttcccagccggaggtgagggaggcgtcagccactttcattccgcgtaccgtttcatataaaagaagaccttttggggtcgggataatgtatttgcccgaataccggatatatttacgctccagaagcgtacggatgatattcgtgcgcgtggatgcggttcccagaccggtcttgtccatatagtccgccagttcctcatccgtataaggggcagcgggcagcgatttcctgtgtataaggctgcatcccgttaccggcagcttctcctcccgaaaaagttcagggggtacgggacagaggtcgttgtcttccgcgacaagccgttccctctgaaagataccgagccaccccgcttccagaatacggtatgtacggattcggaacttgcgtgcggcacagaccgcttcaaccgtcgtatattccaccttgcagggcggcatgaacgtttcaagcatcctgccgacaacaagggtgtaaaccagcctttcctccctgtccagttcccccggctgtatgccggtgatgacaatggcatgatgctccgccgtgtcctgatttccggttacgcctttccttgcagcaaggtcgatcataccggcatattgacggaattccttgccggacagcagcttttccataaccggaggcaacatgtcatacacgtctccgggcagcagacggctggaagtgcgcgggcaggagatcagttttttctcatacaggctttgggtaatttcctgcacccgtatggctgtcaggttatggtaacggttcgcatccttctgaagcccggtcaggttataaagggcaggtgcggtgatttcctcagtccggctgttgaccgccgtgatacgggcatatcctgccgccttgcagtcctcgtaaagttccagggcatcccggcggttgcagaaatcttccacatgccgcatctttattatcttcccgttcttgcagaggctgacgaatacgggccagctgtctgcgggaatgtgattttccctttccctgtaccgtccgcttatcgctgccaatacaggggtctgtacccttccaagcgagttgttcccgaaaccgaccgccttgcagacggcatagctcgaattgactccaagaagccagtcggccttgttgcggctgtctgccgccaaaaacaagttgtcgaacaggctgcagggacgaaggttttccattcctttggcaatggcttcgtccgtcaaggaggagatccacaggcggaggcaaggtttcctgcatcccaaaaaacgataaagataccggaacagcatttccccctcgcgggaagcgtcggttgccgcaacaatggtgtcacacgcatcgaacaccccggctatcaccttcaactggagcaccgcattgatgtcgggattccatcccgtgtccgtctttacatgccgtaccgtcagaaaaggaggcggcagcagggggaagttctcccgctccacccatgccgtaccggtatctttcggcatcgccagggaaagcatgttgccgtatgtccatgttaccatgtatccgtttccgctcatatatccgttctcttttctgtcagctcccaaaacccttgctatctctctgcccacattgggcttgtcagtcactatcgctatcatattctttttccttttgatgttccgtaccgtcaggaacggcacggaacgtgagttatacttattgtttcccggtcaaactgccgcctcctccttctgacggagaccgtttatttccataaccggtctgccgttgccgtcgggtaccagcttcagcgtggcatccattgtcaggctgaggaccgaaatatggagtttcagcggaacgatgcccgtttcctttccttgcagcaacagttccatgttgccttccgcttccagttgtttcttactgatacctgcggccttcagaccgtcccagtcgatatcttccgtcttataaatatgacgggtattctgatccgtattcatacgattcgtttttttaggtttgtatgattgattctgtttctctccgggcaggtctatactgcctgcgatgcacccttcttctgctcctgctgttgtccctgtgcggtctccgtctgtgcggcacggcgggaagtgtccctgcggatgtccggattttcctgaaaatactgcaactgcccggaatagggattgactttcaggtaggaactgaaggtctgcccgttgtttttcagcccttcgacaagcaaagtcttgccatcctggaggttcgctttttcctgtgccgtgaacacgtgcccgtaaacctccgccggaatacgcggtgcctgctgctcgttgaatccgttcggcgtgcgtgaatacatcgtcctgccggtattcatatccagcttgacgaacgaggagaattcctccccgttgcgcccgatcatgttttccagatagaccggctgtcccttgcgcagggtttccctgtcttcggcagtcagctgcacgttgcagatttcctttggaatataaatctctccggtttccggattgtgccgcgtgtagttcgggcgccccgtaaccttgtctatcgttacaaaggacgagaaggtgtcattcctgttcctgaacttcatgtcttccaccagaatggtatgtccttcgctgagcatttttatctgggtgggcgagagaggcacgcctccgatggaacgttcgttgaaaatctggtttttcggaaagatgaattccagtcccctgcgctcggcactgtactggagtgtggcatcgaattccttgcctgctttggaagtcataccctccactttgacaggctgtccctccttcagcagcctgatctcctctgcggtaagtttgaccccgctcacttcctgcgggatgtaaacgtgctcctgacggacggcaaccagctcgttggtgctcttgtcgatggaaatcagacagggggtatattcactgccgcgcaggttgagttctgccacacgccccatgttgccggtctcacgcaggtttttcttgtcctcctcgttaaagttaaacccgaaataaggacgctccaactgcggttccttgcgtatgccgtgaatggccagtcccacctgtccgtcctgttgcgggatgagtgagagccttgcatccagtttggctgtcagcaaaccggaaagatggatggtcaggggcaccagtttgttggtcttgtagcccttcagcatggaatcaaggagtccctgctgttccagcgaagcctttgagattccgaccttttccaactcctcccagttgaccatgttctcattataccggtaacgcggtccttgcgactcctgcgctgcctgttgagcctggggctgctgctgttgctgtgccgcctgctgtacttcgctctgttgcaggggttcctgcggttgtgtctctttgtctgccatagctgttttttctttttggtttacactttgttccttcttgttttctctcggacggatttcgtagcgtttgaggaactctttcaccgcatccgtctgctttccctccgacaaatccctgatggcctgcttgttcaccttgtagtcgtggtaggtcatgcggagcaggcggaaatgggtaggttccttgagctggctccaaaaattcttgatgaagttttcgagaatactcgaattcttgtcgaatttcaggaatgagttttcattcttctcgtccgccggaaccgtcttcgcttttccgtccttgtcaatttcactgacagcctgtacaccgaatttcggatcgttcttgttatgaacaagcatcaattccgtaatctgttccaccggaagagcatcacttccggccttcggtttccgggtccgtttgggcttttcgttcgggatcttttcttgtgccataccttttcttttaggggttaatgaattgctttgacgcttcaaaggtatggggtatttccaaataatatgctgattttcaaaaaggtgtcatcagatgtcatcaaatgtcgtcagatgtcataaacatgactgttcccaacggctaaaccgtgaacggagaagaagggaagtgaataaacggaaagagagaagatacgtgaggcagaagggaaaaagcctgcgcatccgacaccagaaaagagcaggcgggcaggcaagacaaaaccatgcagaacagagggagctgaagccccctgtcttctcatgccttccgcttttttacagcaagactttcataagacctgtattccggctggatatgtggaatttcatggattatgaaatacggcctcttcaagcagcccatatcctttatccatgcgtcacatcggtcgcagtttgcccctgtaatcgtttttcaaatcgaatctggattgccgccgcattctttttcgtgaaaattttccacggcgaagccgcaaggaaaatttccacgaaaagattcggcaaatgcggccggcaagacaaattcgattttcctttgatgagggggaaaactgtatcgcaaacaaacctatctggaaattccgtgcaggctcattttcttgtaaagggtcgggcggctgattcccaacaaggccgctgcctgtgtcaggttccctttagagatggaaagagccgtcttgatctgttctatgtttcttctttcatctttctgcaaacacttgtctatcttctctttccccatggggtcagaaacgggctctcccgcatattggagccgtaaggaattgggggtaatcagttttcctttgcatatcaataccgccgcatgaatgacctgcttcagttcccgtacatttcccggccaactgtatcccagcagcatcttctttgccggttcgtcaaaatccaagacctctttccggagcaatccgcaagattgctcccggaaaaaatccgccaaaggcagtatatcctccaggcaattatgcaatgcaggtacggtgatggtaaaatcctgaaagcgataaagcaggtccttccggaaacgcttttccgcaacagcctcctgcaaatcctcattggtggccgcaatgatgcgcacatccatcagcctgtcccgttgtccgcctaccggacgataccgccgttcctccatggcacgcaacagcatccgctgcgtttctatcgaaaggttctccacctcatccatgaacagggtgcctccctgcgcttcctgaaaatatcctgccttttcctctgtggctccggtaaacgcccccttgacatggccgaaaaaggcggaaggtgccagctctttggacaaactgccgcaatcgaccgttacatacggcttgccggatctgaggctctgcctgtgaatcttttttgccaggtgttcctttcccgttccggtgcttcccaatatcagtaccgtcatatccgtcggcgctaccatgtgaatgtaccggttcaactcgcaaaaaggggtgcttttgcgttcatagattaccttggtgaaagcctcgttcaccgtccttatttttttgattacgggcagcagcctggtttcaaccagcggtttgaggatataatcttccgcacccagcttcatggtatgaaccgcagaatgtatctcttcataattagtcatcatgatgaacgggtgcatatagccgttctccctcatccactgcaacagcgtggtactttccccgtcaggcaatcttaaatccgccaatacgatgtcatcctcacggacggatgtcccaatgaccttcttagcctgtgccagcctgtaagtccttacagtatccaaatccgccttctgcaaaaaattgcagatataattacagaacaagacattgtcctcaacaacaattactctcataagctttcttagcctgttgtgccaaacatattatttcttttcctttttccaatacctgctgtacagtccgcccgaactcgtccacagaaaactctcccgaatcctgaagcagtgcgaacaactcatgcagcggcttgccggcatgaatgatctcccatgagcctgtcagatgatgtatccattctttcagtgcctcatgatcattcttttctgcacattcagccatagcctccatatccttcctggtctcccgaatcagggtatccagcatcttccgcctgttcccatatttcagcagggcatcgaggtctatctgttcagactgcctttcacttcccagacattccgtacatacctgcaaaagttcttcggcggaaaacggctttttcaaacagcccgaaaaccctgccgcatacaaatcccccgtatcgcagtttcccgatgcggtactcgcgataaccggaatgctccgtgaatttcccacattggccatgcgcaggagcttcaacacctcgaatccgtttgtccggggcattttcaaatccgtaatcaaaaggtcataactacggctgcggacatgctccatcagatcacgcgtgttctcacataccgtgcaagccaccccgtgatacgcaaacatttccctgattgccgccagcaaaacggtgtcattgtccaataccagtaccgtataggaccgtacggaaatccggctcctgccgctctccgccatcgcttcctctgccacagccaaaggaagacagacagtgaaccggctgcccacccctttccggcttgccacttcaatcctgccgtccaacaatccgaccagaccttttactattgaaagtcccagtccgaccccttcttccgcaatcgcattgggaagcctctcgaatgcagtgaaaatgcgtgtctgctcctcatcgtccattccggtgccggtatcttccacgataagcgtcaatacgccctggtcaaattgtgtgcgaaccgttacacttccccgctccgtaaacttgattgcattggacaacaagttgcttcctatctgtattatcctgtccctatctcctataacaaccgcatctccggcactcagcacgttcagcaaaaggttttttcctgccgccagcggcataaaatccgtttccaaaatctcggtgacggaacataacctgaacgggacaggaacggccttttccccgccactctccaaccggaaaaatcccaacagggaattcagcatggaagacatgtgtcccgccacctgccgtatgttccggctgtattccctgcacttcgacacttctctttccgtggaaagcaattccgcatagctgctgatagaagcaagcggcgcacgcaagtcatgggttacggccagcatgattttctttcttgcctcaatcagttcctcgttttcaagaacggtctgctccaactgacggactgtgccttccagcctttttttataacggtttatacgcatcatatcccggtgtatcaccatataggaccatatcagcagcaaaaccatgaatgccgtcagaccgatgaccgtggcaaatgaccgtttcccggcttccgcaacttcttcttcctgtctcttcaagtccgcttgtaccgttccatccatattctcaatcatctgccgcaactgcacattcagccttctgttcatcccatccaagctgtccgtccgttctgccagcttccgggcatacgcctgctgtctgccaaccacgctccgattaagctcatgaagcatggaggcggcagaaggagaatccgccctgtggcgttttgcgaacaacctcttcaggaatcccccttttggggcattttcccgttcactctgtctggcaatggccggaatcttcgctgcaatttcccggtcggcttcctcctgcctgtgtacccaatatatgatttcccgcatataccgctccttggctctccacaaattacggatgctgtctgtatgtgagccggaagaggagtacctcaagctacacaacaggctgtcaatgtgccgtctccgtttctgaaatgataaaaaatcctgctcactccactccataaaggtttcacagaagaaagaaagcctgagcattttcacgtatatatcatttatctcatgctttttccggttaatcatccgtacttccatttccctagccttagtctctttccattcgcagatgccaacgtaagcaataccacttatgactacaatcttggccatatatcctaccgctattttggcaagaagcggttgcaggcgcaaagatttcaacaatttattcctactttccaattattcactttttaattcattatattctattaaaattctttgcaaaataaaccgaccagtcggtttattttgcaaagataagccttttccaagaataatgaaaaaaaacaggttccagcaagtaaagttttatcatttatcagtctaaaagacaacggaatgaactgaaagggaggaaaaggaaaggaatgcgggcttaaatttctgagaacatccccaagaaagtcttaccaatagaagtgttcaatgcctgtctgctgaacgccttggcatccttcaaacttattttatgaccataagccacattggaaagaaagtcctgttcccggacaagaagttgctgatacatttgtggaaattcgtccatatattcatgggcggaggaaacaaactgcatataacatatcaggagattgccattcagatgttcgggaaaactgtttatcacccgttctatcggatttctgtattgccttaaaaactcattccaatccttgtcagccaaagaatacatttcacaagaaatctgcgagtcggggaaaaaacgcattctgacaaccgcatcaatcagtttctttttggaaggaaagtagtgtatgacagcccctttggatttatgcacggcaacagccacatcacagaatgaggtctgcttcattccttttgtgatgaataacctgtatgcctcctctataatccgctgtttcaaattcgggtccatcctactgcctatattataaaaaaatagcacagacgcaatcaacatccaaacatggtagtggaatacctagagacgaagtgacgcacctgtgctatatattttaatatagcgcaagctgtcatattccatcttgtctctttgaaattttccacttttcgtttggaagatgatatatgatactatactatgtcgttttaacagcgcaaaaatacgttatttatcgtttatttccaaatttatacgacacttaatagcactgttccataagaaaagcgtccgctttcagggacaagcagcagtattttttcaccggatttgagtttacgggtagaacagaactcatccaaggcagccagtattgctgacgatccgatatttcccacccaggtaagattggtaaaccactctcgtttgtacaattcaaaactctcgtttttcatcgcttcaatgagattaccataaataaccattgacgaagagtgaggtattacataatccacatcgtcaggagtcatgccatgtttattcagacatgatttaatatgtctaatccataacggcatcaacttcgtccctaaaagtttaatgtcctgtttaataaccataagggactcatcgaccaattcctgactttcaaaagatttccagcttttcagttcaccgtcctccctccggacagctccggcaaacatacaggtaggggtttcattggcatatgaatccatttctatccattcaatctttaaagatacgcccttttctcccggatgattttccaataatgcacaactcgcaccatcgcttaacataaagcgcaggaagtccttttccaaagccatatatggattggtgcccaaattgcagcatctttcatattcgatatcgaagtttttggataaaagcattgctgacaccaattcagatgtgctgcatattgcattctgtttttctgatgcagctatgctcaaataagctattttcagcgcttgcagacaagacagacaaactccagcagaagagaatatttcaacaggttcttcccaaagcccatgtaccatagacgcatgagaaggcagaatctgatcaggggtcgcagtagcacaagcaagcaactcaatgtccttttggctcttattggtcaatgccagcaacttacgtatagccagcatcgccatttctgcatttgtatgtgtgatttcttgatttttgtttaaggcatagtatcgccgtttaattccattttgctttaaaactatccgttgcactttggaatgttttccagaaatgagtcccaagaactcttccatttcatcattggaaacaggagagttcggaaagaagcttgcaagcccagtaataaaaacatctttcttcattagttcaatttttaattagttcatattgattataaagaactactttcagttcttctattcgcaatccattcaccaatgcatcctgaaaacattttccaaacagcaggattcgaaatgtcaaagccaatgtagaaggattaacatcggatcttatttcttttgtttcaacagccttcacaaatattctttcccataatttaatctccttatttgttatttcgttgaaagcctcgttaaatcccggatagaaatattctgcctgcaaaatcaagttaagatatgcacgtgtaatattggtcttctctttttctatgagatagatcctcattgcattcatcgtttcctccaccttctttatgtaataatcaataaattcaagcagagaggtgtgagaaatgtccttgaacttatttttggcatcttgtttgtgaaaaatgtaaaaatcaatcacatcaataaacagttcttgcttgcttggataatgatatgacatacatcctcttgataaattcagacttttttctatctccttcaggggaaccgtgttgtaatcttttgtcagaaactgtttgtatgcagcttccctgattaatctttttgtttctgagccttttactcctttcataaccttgttttttagtatcatacaaaagtaggtcttttgagtgaaaacacgttcatttttagtataattaaatatgtcctacccaattaccattaaatcatttatgaccatacataccagtttatgaaataaatgccaacgatgcctttttcttttttttcttatacatatattattttttgcttatatttgtcttcaaataagccgattagtcggtttgttcggcatagaggaacccaaacagaaagtggaatttcaaaacagagatgttcctctatgtctttgttattccatcttctggcaaccggattctatccctgttccaccatatccctaaaaaataccgaccggatggtattttttacggcaaaagtataaatatataccataaaaacaaagggaaaggccaattatgcattctatcggcaaagaaatgcctatgaaatatacataatccgcttttccctatgagaaacattatgttaccggcttatcttgaaggcatcttcatcttaacctgcaccccctgtgagtttaaaacacgaaccggtgtcttttctccggctttcaaatagaacagaatataatccttcgcacgctgggactcgaagaaacctttttcgcgatattcggcaatccacctctgaatcatcggaatctgccaacggttcatcaaaatatagtagccgaaataatactccaaatcgctcaggaaaatattgagtttcaagtaatcccaccagaactgttctttctttttgcttttggcattgagtatgataacctgatgttcataagtgtcacgaggattttcccaatcctgttgcgaaacaaatacatcgggaaccacattatcggcatgatcctttgccggaataaagggaaataaggattctattgaatcctttatctttccatataaggacggttcgtactccttgttgtacagcataacatcccgcaaacgggtggaagtgagatgggttaccacggaacgtcctaccacacaatgatccggaacagtcattaccgatgccagacgtttcataaatctgacttctgcttttgcctgttcttccttatccggtctcttgaaaggataatctgaccaggcaatcttccgcatcccccaatgcaggtctgtaagttgcaaccccgcataagcacagaaaatggaagcacgaattatcttgaagataggggtacggtcaccctcgtgggccacgtaaggcaggtcttccacgccaaaaagcatttcattttccgctatcaaatcggcagagaccgtcttgccttcttccaagcgtcccttaatcttgaagttacgcttttggtatccccaagtgtgaacaggtcgcgtagctatcagtgccacacaataattgccgttttgcggcatgaaatctacattttgcggtgttgcattgagcatcaactcgttcagcaacttaatcttttggatatagtccataaatcaacaggttttaagtgaaacattttgttaacagtgcaaatgtaggcatcaagtttcgtaccggagttccgtttttcgccgaaaatcactgcagggtcaaccaattattcaatatttattctgttctcgattctcagtatatagtttgtttccgagaaaaagcgttccatacgtactgcctgaccggttctgaacaaaggtttttcactattggctatgtaggctttttttatgggaaaattccgtgcctcttcctgttgttcaaaataaccaatggtagaacgcaactgctgttcgccgtcttttatccattgattacccttgccttttctttgtttcaactctacaaatataatcgtatctctataaaacaggcagccgtcgcagcggttgtccatactcccgtccgccctgcgcagttcaatgcaatggtcaaccggtacgaaattcacctttacctgaggataattgtccactgccgcaatccaatcctgcccctgtctttctgcaatatatgctttttcagcggcaggagccggccggtcgcatataccgaatttgcgtctgtttgatgatgatatatgttgtgtcgggaagaagtcaatcataattcctgttgtatttccaataaatcggcaaaatcttcgtttgttctctccagcatcctgttgaggaagttctcatcggaaggaagcccatgatatgtgtccagtactgttactgtcccttcgacctcgttgaactcgtaaatagcgatttcgtcagggtgtatggcagcttctatgggataaatagcatttatcctttcttgtacctcacaggaaagattacctacagccaacagcataccggctttgacagcgacggtcaggctattaataaggtatgggctatgtgttgtaactaccaaacggtttgtttccaaagcattgttaaaagccagcaactgtttcattatcatccattgcgattccggataaaggttttgttccggttcttctacaatgttgacaaatgccgatttgttgaatctggcagaaacggctgaaagggcaatcctccgttgctcgtccgtaaggttcggtatgttccatatattcgcaacttccgcttcgaagcgtttcgcttcatcgctgctcatcttctgggcactattcgcctgactttttacagattcggacaaatgtaaagaaaccaaataaagcggtacgatggattggaatccgctggacgcttccatcaacttcaccttatagtcctcacctttgacataaacaatgtcattttgtttgttatattccagttgcgcatgattgataggcagttccagactactcttaatgcgttgtttggctttgtcatattccgtaagaaaacctagcaaggcatccggcaaatccttaatcagattcggtttgttgaccatgctgatgaaattccgttcggcaggaacgtacatgatttgaggaagggcatagctgtccaatgcattctcattcttttctatgacaagttcgccttgcttcgtgtaggtaaacttgtaggaatccccttcgtagaaaatctcagtctgttcctttatgaaataattggaaatacgatggtaaccgcaatacttgttcttgaacttggcggcggtaaattctttctccttgaaatcaccccgtgtcaagaccttctccatccatgtaaaggtggaaaccagtttggcaaccgtacttttaccgctaccctggttacccgtaaaaacggttactttctttatatctatccatccgtccgttacagatgctgtttctttcaacggaccgaagtttttaatcttgattctactcatatatttattgtatagacctgttacaaagatagtgtttctaaatgaaacgacctaatgaatgttgtgtttcatttgcagtgaacatagaggtcttcccaattctttgtttttccaatttttaacctgtatgttttatgatggttttctaatagtcagaagtgtcattctgatatccgaatgtgtatcagtcggcattgaacggacggatttcggaaagattttcattgccgctgtcaataaagcggtcgagcaccttaatcatgacaacaggtatattctgcttccatagtatctgtgcgtccagctctgtacaaaccaatgccatctgtttcaattctttttccaagtatgctcccgaactgatatattcattcagaagaggtttgttttcggataatttgattacagaggcatataacttgtattgttcattgatacatttcaaatgaaacttgtcctttagtgtggaaggcggatcaagtaatttcagtttgggcaggtctgacttgttgagaataatcacagtatttgtaaattcgactgtatgatctccaggcagactatacaacaatctgttgtcaggggatttgaacttatactcgttttcctttcgtaaattctgaggataagcattgtaccagttgaagtggaatccgatgattatctgtttgtcggtcaatcttaaagtctggaaggccttgtcaagattctccggaaaaaccctatattcacttttaggctgatactggaagcttcggagccagcagtttttgaaagagtatagtgtagcagcactgaaagactccttaaaattgacatatcctattgttttatccgtacagaatgcctctgccggcatcagctgacgtattcttccgacacaattgaacttgttacagcttttgtactcatcatcagttatgacagaaacttctgtaatccacttcatttctctgccaatactatctgatgctatttggtaaaaatcctgaatttcatcttcagacagctgttgagtaactttttgatgttgtattgttgaagtaagcgaattggaaagggactccagtgcattcttcagcttatgtttagccctgtatatgcacgactgatccaatggcagtattgttgtgatgtcttccagtggaatggaattctgctcaatctgtttcaggataatcggaacattttccagccattcgttcttttcggataaggattcaggaagagccggcagtgaataaaaatcctcgtaaacataggtgcggttaagtgttgccagacgtaacattaggatatacaagtatttctgtatccagccattgatgatgctattgttgcgtacgccagcctgaagaccaaaaaatggatatttttgctcgtatttgtacattgaatcgggactgaatgagagcaagtccatatacagtggaataatttcagccagtgaacttggaatcagtacataatgagggggttggctattagtgtaatacaatatttgatttaaaagttcatattcttttctatataacaaaagtccacctaatgcgatatgaaactccttaaattctttccgttctttctgcctaagctctaccatttggctgtttgcaacagtttgtccagatgaagtgtagggaacgtttatacgttcatcaagttggaaagatgtaagatgaagaaacaagtgtgaatgggctgcaccccaatatttaagaatccattcgctgcgcttgtaaaacaattgctggttcaaacaagtccaaatcgtacggtaggtattctgatgcattatggtgaactgaaaatcatccagcattgcattgactatatcatttccgttcttgatggaaaccgcttccttttgttgcatgcacagctgctcattaatggagacaatgccttcgtataactccggcggatattccattaacgtccattgtttacctgcacgtaaagatatgatccagtcatacaattcctgatagcaatcgcgcaatacatccacattgttctgtttgagcatggcaataaaaagttcgaaccacgcttttctggtatcttgtgggatattgtttctttttatcaaatgcttttgcagcttttcaggtacattatagatatagataagcctgaaaatcataaatatactgaatgttagcagtacacagaatattgtcgcgagaataatggcagaataatctatgtactttgtaagaactccgaaatcaaaatagttaggtggagcgaccaattgatagaacagtaaaaatatggtaatagcgagcaagccaagaaaatgctttgtgcttctttcgttcataaagagttgtatcaggcgggtagattcatacttatcgtctatccgctgaataactccaattaacaagggaacggcaatgcccagtatggctgccgttataggtataataatttctttagaaaaaatgtccataatataaaaaatgttcaatagttgctatggtactggaggaaactttatgcgtccttctttatcgatggtacaagataaggcttccccttgaatttttttagctatacggttataatttgttgctgttcgtgtttttaaatctaccatttctttccaatcaaaggtatgctctatattaaaaacattctgttcatttgctgaagtaaatcgcatggatgattttacatggatattaccctcttgagaccggacattccagttaaatctgggatgatattgtaattttgcagcgaggcataatctttcgactgttgcctgaattatacctatagtcgtgtttaaatctttcagactttgggagtaataccatttgaattcatcatagatttggtaatccaagggattctcaaaaggttggaacaactggtaaattttgctcaaaaatgatgaatcatagtcatgtaaaaatgccggaacctcctgatccattaaaacacggcagcctttggccccagcctgttccaatttgacagccttacttacagcatttcctagcaacatttgtcccaaattagtgttgttatcttcaatgatatctccgtatgcaataccaccacgacatagaataccattttgcaaacaatcccacataatagtatgacatgaaagtatgacatctttcatgttttcagaccagacgaaagcgcaatcggacaactgggtgaaatttactgtagggtatttactctggcagtttgccaagattttccgaaaaatgatcaaaatattggctgcaaattcctgattccctgaagtctgaaaatgtttagagacctgccaaatattaaaatcgtcttctgtaagctggattttaccttgtgttaaagctgaaaatcctagtatatccacatagaagacaaaaccttttagattattcatgttcataatgttatcgtttataactggttgaattttttttggacattttgagctatactgatgaaacagttgggaattgtaacatattagttgttgcttgtcacaaagatagtatatctaagttagatgagttaatgggggctttgttttatttttgattttgccaataaatggtatttcctaaaataattttgtatagttcttcatttttattgtaaaacaagttatattcttctttatgtttccatcttgaggctgttttgatgactttaatgagtttattattatcataaaagtattctatagttgaactatcaccataaatattaactccaacatatattgaattctcattatttactatttcaaattttgatatagatattaaattaattacgggtgtattttcattttctgttgggtaatatttgaaataggttttgttatatccatgtttagaatattcatataaactgatatataaaccttttcgtatatctgcatctatatgttgctctgaaataatcattttgttattttcatcgaagccaaatctgaacaagtcctgataattccatttttcaatggtcatgttttttaaaagtctaccttttttttctttattaagtaaatgataataaggtagtagattataatattccttggtcgaatattcccatctatgtacattttttaaatattcttttataagaagaatattattctttttttgtaaacttgttatttttaattttaaatctgttaacataattgtcgatatttaatataaattacttatgaattaatgggttgaattgttccatcttccactttctatttctgttccaattttttgtaattgttttctgacataattgtcttttaaattatcgcttaatttattgtctatcgcatatttctcagcactctctaataattcacatattcgtttatcactttcaagcgaatgtatgtaccctgcatggtaagtaccagtagttctggcagcttctcttcctggatgtccagattgagttacttgagaattagcagtaccccatagagcaactccattttcggcatcattaattcctatgtgacacctttccaatacggctttggatctgtttacatattcattattccgattcaattgaacaatatgatgtggagtctgtccagcagcaacaggcctataggcattttccatagctttttttaatttataagcatgagataagcctaaaatatcaagtgctatgttagtagaattaacatatctatatattgctaaaataccagattttaatcctataggatcttgactcatgtaactaccaattcttggttcataatacctaaaacggttgtagtataatcccgattcctcatccacatattgcccttgaaacctgaatggacaatcaaactccattcctttatttacagtaatcacttttccataaatatctagtgtacaatcccaagttttgtttcctttttcatcgtacatctgaataggtgtacccaaataatcggacacaatagaatattgcttaccatcctgtatctttgctgttggtacaaacgtgcctgcttcgaacacccaggtggtaacatcttctgccggttcttttggaaggatgttttcctcttcgtccgattgtaagccaacggctttatagctccattcgtgtaaaggtacgtttccgtcccacacccagcgtgtgacctttccgaaatactgtttggcggtgcgtcttcccaacgcatcgtaacggaactccaccggtcttccgtccggacgtataaccttctttagcataccattggaactccactcgtagagccatcccgtacctgtagccagacagcggacgccgcgctccttctccatgcgcttgcggtcataccttacgcccgtttcctgcaaccgtttgaactcacggaaaatgaggtttccttcgtcgtcgtagtgatagaaacaatccgggtcttccaacagttttcccccgggaccgtatttgcggtcttttttgtccggtgtctcaaagaggttgcccacgaagtccggtacgcggtaaatcacgtccgtttccgagccctggatggtttcctgccggataaggaagtcgaaacggtcgtagtcgtagcgcatgaccgttcccgtcagctcgttctccttggcgagcaaccgattagcgacgccccactcgtagcggtacgccccgcgctcgatgccgcccgcgcggacggacttgcgcacctcgcgcccgaaacagtcgcgctcggtgctgacggttacgccaccggagaaggtgcgctgcacctccagccccgtattgtcacgcacccacgatgcctgccagctctcgcctgcctgcatggtctgcaggttgccttcccggtcataagtgtgacgaatgtccgctcccagactgctggtgatgcgggtgcagttgccttcgctgtcataggtacggctgacggtgtattctccctgcctttcctctgtaaccagtcccgtcttcctgtcacgggtgaattccagcaggttctcgctgtgtttcgccctgacgagcatgccgtccttgtcatacgtgtagagggagacctccccgtcatactgttcctccttcaggatattgtccagtccgtcgtactggtattccgtccattttcctccgggacggttcacacgggtgacacgacccgcgccgtcgcgctcgtactcacgccgcagaccgtcgaagccggtttccgtaacgacctgtcccagcccgtccagctcgaagaaatagttgtcgcccacctcattgccgatgcgccggagctgcaactcgctgttgtagccgaatgtaatccagtgcctgtcctgctcgcggcttttcaacacccccagcgccccataggtgaacctgacctcgcggatgttgtcgctggcatgtaccatgtttcccatggcatcgtactcaaaccggtgcacgttgccgtccggttcttccagccgtatcaggttgtccgcccgattgtaggcataacgggtaacattgcctttcacatccaccgcctgcacaagccttcccctgccgtcgtactcccaccggcggaacagcccgttggggaactgcagcagctccaggtcgtacctgtcgttgaacgtgagcgtgtaaacccggccctgtccgtccgttatggtacgcaacacgcctccctcgtagacatatttcacagtttctccacccggtgtggtccggctgacgacccgatcctgtccgtcatagtcccatgaaagcctctttccgcacggagtgtagagcgagaccaggttgcggttgttgtcatagtccaggaaggtgtcctccccgttctcgtccgttatccggaccggcagtccgaactcgttgtaggaagtcttgcgggtatagccttcggggttgaccgttacctccagctcctgaaagctgttgtactggcggcgggtaattcccccgttggcatccactatcttgtagatgagtttgtcctcaccgtaataatattcggtttcggcattttccccattgcggatatgggtatatcccttaccgtaacggatgaaatattccatcacgcctccatcgccccatgtatgcacacagcgggcattctcacccttaccctcgtattcccaatggaaggacatacccccttggttggtaagctgtaccagcaggtgcccgccggaatagacgaaatgcttgctgacatccagcgcgtcaatggtttccaccatgtcgccccggtcatcgtaacggtagcggaccagcttcacctcctcaccgtcctgatttacggaaacgcagagcacccgccccgactcgtcggtttccactttcaggaattctccccgtgaggatatgattcctgccagccttccccccgaagcgtattcgaagcggagccggaatccgtccttcgtggaaatgcccgataccatgcggtaaccggagcggttttcgggaccgtcaaaacggtattgcaacccccggatgtccgtaagcatgtaaccccggccatcgagtgtccatgccagctgttccctgcggtcaaaatgggattctccaagtttcagcgcaggcaggaaggactcccgtccgtcagcatgacggaatgcgaacgccccttcctccaactgccgtattcccagattgtagctgtggtgccaattgtatcccaacggaccgtccacggcggcatcactgtaataggtacgttcccatacgacgggaatcggacccggaagctcgaagtccacattggtgtgatagaccctgcccgtagcagcgtccaccggctcaccgaatatgatgcaagctgttttcttgagaatcctggcaagccggggattcaatcccgccttgtctatcaatccatgcagcagatgggatatttttttcccgagctttgacaatcctttcagccccagcttcatcgccagcgcaaacacatcaatggtaggcggtcctcccacaagcacgggatttcctacggatgtgatggtggagagcatggaagtgggggcaagcagggccttgctcaccttcctgggcttccccttgcggggaatcgtcggtattcccacaatgttgcatgagagtgccggatgtgtgagggaggaacagggcgcaccgtccgccaggacagtggaactgcccatccacatctcggactcggacataccgctgaccaacggggccggatgcaatacaaatgccggcagatgcacgatgccgatacctgcctgcgcaatccactggttatgcaccttgaccgacggagccatgctcttgaggatgttgcacgccactccggccactccatcagccgcaggcggcatggcagccgccatgccggccatgaggtctgccatgaggtcgtacaccttgcctacatgaggcacaggcatgatgggagagggaggggtaacggtaggatgcatgtctatcccgatggacaggtcgccgaacttggcgacaggcatacccggcatggaaggaaggattccgcccagacccgcctgaatctcgtccaaagccgccttggaggctgaaaaaaggtcggcaaagccccgtctgacgctgctgctaccggcggcgtcagctatattcttgaacacatccggcataatgaaactttttgattcttgtttttaaaccgattggtcggtctgctttttgcaaatgtatcatttaaaatcaaaaaagaaaaacattctcctactattttctatcaaaaatcataagacaatccataaaaggcaattgatttcaagtcatgtatcaaaaaaacgtcgtatatttgcatctgttgaagaaaaaaggagagtaaatggactttgaaggagaatataccatacggacggcttccaaccagcagacatacgagccgaataccgtatatccggacgcagtgctaaatatagcccgcgaatcggcttccgtgttccaactgaagcggaaatgggaaaaaactcctccgatgctgaatctgacccctgattttcaacggggactggtatggaagaccaaacagaaaagcgagctgatagaatccatactgatgggtattcctctacctctgatttatgtgaaggaagatgagaagggagtgtatcttattgtagacggcaagcagcgtctgagcaccttgttcagttttatcaacaatgaatttgccttggacaaactcactatcctaaaggacaagaacggttcccgattcgcagatttgactccgttggagcagaataaaatagaggactgttcgcttaccttgcatgtgattaaggcacctaccagtgaccgggttacctttgacttgtttgaccgggtgaaccgtggcgggacgcggcttaacaatcaagagatgcgcaatgcgctctatcagggcaatgccacgaaactgatcaaccggctggccaagaaagaggtattcgttgaagctacagaaggttccattccagacaaccatatgaaagacaggtatctggtactccgttttacggctttttatttgtggcagcagcatatcaccatagacccggacacccatgagcctctggattaccgaagcaatgtagaggattttttggggaaaacgatgcgttttctcaatcagctggagccggaaaacggtttgtttaaagaactggatagccggtttacacgtgccatggagcttgccatacaactgcttccgtcaggcggcttcaggctgccttcgttacccggcaagaaacggccgataaacatggctttctttgagagtttcagttatcttctgtcaagattgaacggagaaggggaacaattccatcgtcaggttcaggatacttatatgcaattaatgtgcaatgatgcctatctggattctctcacacgctccgtggatagcggaaagcagacctataagcgttatgaaattatcaaccgacttattcatgaactgaatttatgctaaacaatctgactgtcaacaattataaatgcctggtggaatgttcgttggaattaaaacctctgaacctgttcgcaggtccgaattcatcgggaaaatctaccgccctgcaagccttgctgattgcttcggataacgtgacggagcaaaaaggcaaacacggtctgaagaaccggagaacagaagcgtcgaatttcaatgatgtaaggaactttgtgaccaatgccaagtcatacgaaatctgtatttcgtatcatggagaagatccgacccggctttgttttactccgggcgatgactcattccaaaccacttttgtggaacaatcggctgacgcatctccgaacctgctgggagttctcggaagcgagaacctgctgtacctgcctgccacacgccccggtggggcatatatgcatcccgttaatcccgattcggaaaacaagctggggcgtaacggggaatttgtgatagactattacgccaagcaccgtctggatacgctggatgccgcattgatcctggctcccggcactcaaaccctggaaggtcaggtgaattatcaactggacaggctgaccggttaccggctggtggtggaaacagtaggaagcaatcattacgtaaaatatgaaacgcgcagcggcaaacagcttctcccttaccatgtcggtaccggagtaagctttatgacggaagtcatcatagcttgtttcgcgaccccgaaaggcggcatggtgattacggagaatccagaaatccatctgcaccccaaggcacaagccgacctgattgatttcatggcaaagatagcgaaagccggtgtgcaaatcatcatagagagccatagcgaccacctgtttaacggtatccggcgcctgatcagtcaggaaaagttggccttgtctgacgttgccgtgtacaacttcagacaagacgggaatggattgacccatgccgaacctgtggaatttaccccacagggaggaatccaatcctatattcccggcatgtttgagcagtttgatattgatttggatgccattttaaagctataagactctatggacggtatcattatcaatgaattgtcattgaacggacagtttttggacagccgggatttctggaaaaacggaatgcctccgtttcacaaggcattgcaggatgccctttcacatggagtgggatatctgttcaaacaaggaagtttttttgctgcgcaagccactcccgacaagactttacacgatttgctgacagcaccggaaacccgtatcatcgatgaagccaggctgtataaaagtacattggcacgtgccatctgtaatccgttttgggatgaagctccccaacaggattccaatgcccaatattcagtaggtgaaaccgatgtatccggcagttcagttgccgaagcagcagcccgctcggtttgtcttctatcatttattagatccaggtatgagaagcatctggttgccgtaaccaaagatgaagaaccaatcgaggttggtaatatctggaaagagaagcaattgtactctatcttgtttgaaaggggtgaactatctctcgaaaagtatattaccattcgtttcagtggaggcaagcttgatttcagccttattgatgacacgctgggtttttcccttattgacggcgagaatcagaacgaatttattgattcattccataaatttgaggagttggactggagtgccattgctacagataatggattggattataaaccgtataacaagaacaagaaaagcaagcgctatttttcggatgacctatggaagaaaggcattaaaaagttcagaatcactcagcggaacaggtgtttcggctatgtggagaatggtgttttttatgtgttgaggtttgatttggaccatgagctaagcgatgttggataatgtttatagccccttggccttatttttataaaaatagaaagctgtgcaaatttataagattggcatcttgcttatctccatatactttcagtcggaaattcaagaattacaaatcctaatacttataaccggcggatttataatccgccgggacgggtcttgtaacttaacaataaaggtagtgttccaataattaatatgtaatacatttgttttgatactacctgctattgtactaaaaaattaagaatactcccaatatgcaacaaaaagattttcaatattttcattttctattttaccatatacatatatacttccactcataaattctgagatgcctctcattccaatttcgttgatttgaaaaatgaaatcatatccatcttttgttacttttccatcattatccaatccccattgtattggtatagcttttcctccaaatttgataacattatttttttctggcccatctctgtcttctcctatttcatataaggaataaatatcatcaatttcgggatgtttaaatttagtacaattactctgttcgcttatttcatgttcaattagtaatactttgcaattaggatatgaattgtattctaaggaagtatcaaaatctggagtaaaaatagagtattgtctttctttatttaatgggctttgcagggttaagtagaaataatatttttccatattagggaaagaaatattatctcatattttaggagcattacccccaacccaactattacagttttctttatattcacatatatcataatataaagcgtcttctctagtctttaatatcttttttatgttcataactattttatgatttacatgttattaaattatttgctttagcatgtgctattgcatcctgtctgagtttctcgactaatgcggttgctttttctttcgcagtttttctatccatgccatcagctattaacccttccattattcctctacgtgttaaagctgcatttttgtttatattttctagtgcagattgtcctttcaagtttttacctttcatcccatatctattttgaagagcggtaattctattgtgtatacccttttctcttaatgcaatagaagggttttctttagaaattaaatcaactcctctatttttacttgtgggaagtttattgttctgttcaagccatgcgtgttgaaggagttcgtgtgctgttaaattgtcaccaatattcgccctactgctaatattgccataagtatcgatgtcaaattctttggctacaagtccaaaaatatcaatacaaagattgacatttttgacatagctataaaatctttcacctgcacttagtccaatagggtcttgacttatataattaccaatttctggttcgtagtacctaaagcggttgtagcataatttagtttctttatccacatactgcccttgatagcggaaaggacaatcaaattctgttcccttatcaatggcaagcacttttccatagatatccagtgtacagtcccatgtcttgtttccttgttcgtcgtacatttggatgggggtacccaagtagtcggacacaatggaatattgtttaccttcttgtatcttagctgtaggaacaaaagttccttcttcaaatacccaagtggtaatgttttcaatcggctctttctgaaaggattctcctttttcatctggttgtatttctgtagttttgtatctccattcatgtataggcacgtttccatcccatatccaacgtgtgaccttcccgaagtattgctttgccgtgcggcgccccaacgcatcataccggaattccaccggccttccgtccggacgtatgaccttcttcagcatgccgttggaagcccattcgtaaagccatcccgttcccgttgccagaaaatggataccccgttccttctccatacgtttgcggtcgaaccttacacccgtttcctgcaaatgcttgaactctctgaaaatgaggttcccctcatcatcgtagtgatagaaacaatccgggtcttccaaaagttttcccccggcaccgtatttgcggtctttcttatccggtgtctcaaagaggttacccacgaagtccggcacacggtaaatcacatccgtttccgaaccttgggtggtttcctgccggataaggaagtcgaaacggtcatagtcgtagcgaatgaccgttcccgtcagctcgttttccttggagagcaggcggttggcgattccccattggtagcggtaagcccctttctctatgccgcctgaccgtaccgacttgcgtatctccctgccgaaacagtcgcgttccgtcttgacagtcacaccgccggagaaacttcgctgcacctccagcccggtattgtcacgtacccaggatgcctgccagctttcacctgcctgcatggtctgcaggttgccttcccggtcataggtatggcggatgtccgctcccagactgctggtgatgcgggtgcagttgccttcgctgtcataggtgcggctgacagtgtattctccctgcctttcctctgtaaccagtcccgtcttcctgtcacgggtgaactccagcaggttctcgctgttcttcgccttgacgagcatgccgtccttgtcatacgtgtagagggagacttccccgtcatactgttcctccttcaggatattgtccagtccatcatactggtattccgtccattttcctccgggacggttcacacgggtgacacgacccgccccgtcgcgctcgtactcacgccgcagaccgtcgaagccggtttccgcaacgacctgtcccagcccgtccagctcgaagaaatagttgtcgcccgcctcgttgccgatgcgccggagctgcaactcgctgttgtagccgaaggtgatgtggtgccgttcctgctcgcggcttttcagtacccccagtgccccataggtgaacctgacctcgcggatgttgtcgctggcatgtaccatgttccccatggcatcgtactcaaaccggtgcacgttgccgtccggctcttccagccgtatcaggttgtccgcacggtcgtaggcataacgggtaacattgcctttcacatccaccgcctgtacaagccttcccctgccgtcgtactcccaccggcggaacagtccgttggggaactgcatcagttccagatcgtacctgtcgttgaacgtgagcgtgtaaacccgtccctgcccgtccgttatggtgcgcagcacgcctccctcgtaggcatatttcacagtctctccgcccggtgtggtccggctgacgacccgatcctgtccgtcatagtcccatgaaagcctttttccacccggagtgtagagcgagacgaggttgcgattgccgtcgtagtccaggaaggtgtcctccccgttctcgtccgtaatccggaccggctggccgaactcgttgtaggcagtcttacgggtatagccttcgggattgaccgtgacctccaactcctgaaagctgttgtattggtgacgggtaattcctccgttggcatccactatcttgtagatgagtttgtcctcaccgtaataatattcggtttcggcattttccccgttacgaatatgggtatatcccttgccgtaacggatgaaatattccatcacgcctccatcgccccatgtatgcacacagcgggcattctcacccttaccctcgtattcccaatggaaggacatacccccttggttggtaagctgtaccagcaggtgtccgccggaatagacgaaatgtttgctgacatccagcgcgtcaatggtttccaccatgtcgccccggtcatcgtaacggtagcggaccagcttcacctcctcaccgtcctgatttacggaaacgcagagcacccgccccgactcgtcggtttccactttcaggaattctccccgtgaggatatgattcctgccagccttccccccgaagcgtattcgaagcggagccggaatccgtccttcgtggaaatgcccgataccatgcggtaaccggagcggttttcaggaccgtcaaaacggtattgcaacccccggatgtccgtaagcaggtaaccccggccatcgagtgtccaagacaactgttccttgcggtcaaaataggaatctccgggtttcagtacgggcaggaaagactcccgtccgtcagcatggcggaatgcgaacgccccttcctccagctgccgtattcccagattgtagctgtggtgccagttgtatcccaacggaccgtccacggcggcatcactgtaataggtacgttcccatacgacgggaatcggccccggaagctcaaagtccacattggtgtgatagaccctgcccgtagcagcgtccaccggctcgccgaaagtcttgcacttgatgggctggagaatgtccgccagcctgttcatgccttttttcctcagcctgtcgattaggttttggaagcggtcgcctatcttcttccacatcttgcccaagcctttcagtccgaacttcatcgccagcgcaaatacatcaatggtaggcggtcctcccacaagcacgggatttcctacggatgtgatggtggagagcatggaagtgggggcaagcagggccttgctcaccttcctgggcttccccttgcggggaatcgtcggtattcccacaatgttgcatgagagtgccggatgtgtgagggaggaacagggcgcaccgtccgccaggacagtggaactgcccatccacatctcggactcggacataccgctgaccaacggggccggatgcaatacaaatgccggcagatgcacgatgccgatacctgcctgcgcaatccactggttatgcaccttgaccgacggagccatgctcttgaggatgttgcacgccactccggccactccatcagccgcaggcggcatggcagccgccatgccggccatgaggtctgccatgaggtcgtacaccttgcctacatgaggcacaggcatgatgggagagggaggggtaacggtaggatgcatgtctatcccgatggacaggtcgccgaacttggcgacaggcatacccggcatggaaggaaggattccgcccagacccgcctgaatctcgtccaaagccgccttggaggctgaaaaaaggtcggcaaagccccgtctgacgctgctgctaccggcggcgtcagctatattcttgaacacatctgacatggtgagaattttttagaatgtgaaaaagagacaaccgggtgttccaaccggcacactccggctgtccctgtaaggacttacctatgcatcctgtgcatagtcgctgttccagtcgttctcgtcatccccttttgtaccttccaacttgatgacaaaactctttgccgggaaataaggagtcaggtgaatgtcgaggaaaatacggtctttctgcttcggatcgcgctcgaaacgaagaatcttgaatttctcaatcaagcgtccgggaccctgtatgctatccaaaaacttgctgatctgaccacgcaaatccctttccgccttgctgttccagttctcaaaggcacggcggttgaggaaatccatcagcactttcgttacccaatcgaacacacggactacggaataggtctgcaatcccaagttgtccccgttgaacaatgtcttggcagagaaagccatcaccttgccgtattccttcaccatcggaatcaggccaatcttctcgatttcggaaatctcgctttttttcaggttgaaagcaaccccgtccacctcgctcatggaaccatacttcttaccggcggtaacctgtgccattaccgtcttgtacacactgccggccaatgccgcagaaggaggaatcagcaagtcttcggtttcgcccagttccgcatagcgtccccgtcctaccagatagttgcaggtcatacatacgttggacttgtacacatcgcctcccgaaagattggaatcaaagaacatttcaatgacatcatccggtttttccagatcagcgaaatccgtgtaaatcatcaccttgttgtcatgcgcaatctttgcccatttttcaacaaccttgttggaacccaaatatcccgggataaccagcagggaatagttggtacgcaagtccaaacggtcataattcgcacgaagctcgttagcaatggcatcgataaagaaggagttgtccaaatcggtaagctggctcatcgaagcgttcacaatggagatattcttgatcttgtcggaatccgtattcttgtagaagagcatgaccgtgcggtaggacttctccaactgcctgacctcttccaccgctttcagctggttctgggatagcagaccggacaccgccgcagacttcttctggcacagttccaccatctcgctgatggatttgttgcctttcaacatatcgacccacatctcaagccgtttttccagttccttgcgctcagccgcccgttcggggtcggaaaggaatatgttccgccgtgccttgcgctccggattcatgttctgtatgccgtccacggaagattccaagacattgaaaccgccaaacttagccagaatctgcaattcagcgttcagatttctggactgcgccacagcctgttgctgctgtacggctgcttctctttgtgtattctgttcgctcataactatcattcattagtggggttagacttctcattgttcttcaaatcgtccaaaatggcagaaatcgcattgacaaacgctccacgtgtctccggattttccagcacccgttgcagcaccttgttggaacgcaacgacttctccatcctgtccgcaaactgcttttccgcattcaggccggacaagaatgaactctgttccgtcattttcctgacagaaaaatcaccgacattgtggaaacggaaattttcctctacgggagcaccgtccgcatccgcgaactcgatatctatttccggccggaaatgtgcaaagacttcgtcaatgttggtcagaccggcaaccacttcgggagccaccggctcatccttcgtcagctgttccaccaataaggttcgattttgtggaatttccgcaataccttcggaagcgtcaatcttcacttcgtttccgccgattccataattaccaagatccatacttattcaattttaaatttaaaatatatattaattaaatctcgctcaactgaaaaaacttccccttcttctggccttcgcctgctgcatatccggattgtccaccagttccttccaatcctccccaatccattcgcagagctgccgttccaatatcccgacatcaatcggagcacgaaccagccttcctgtatgaagagccagatacgccgcataaacgaacgtggaactccgcctgatttcggcagaaaggtagctgcctcctgccagggcaagcaaaaaatattcgaaagcctgttccatctttccatcctcatagcgcaggaaaccacacatgcgatagccttccatgacataataagggtccttttgcatgacggcttttttagccatcatgtcatacaaggcaaccgcttcctcccgttttttcccggctgtcagaatggccgctttcatggaaacagccattttccaataactatatcctgccgtttcaccgccctgcatcgccttttccgcctcccggacggtttcgtcgctgtatttcatgctatgcttatattccctgatagcataacatgcctcggatgcgataagcagagcggaaatccggatattcgtatcctttatttcctgtgcaatatccaacagttttcggatttctctgtccaataatttccaatcctgcttttgtgtagaatccatgacaaccgtaacctgctgcttgaaccgattttcaggtgcaatcaggtcgttaccgctatccgaccgtgccatccggttatgcaaagccgccgccatatcgaactgcgggcgtatgcaaaccacttcccgagactcacccagccggatactcctgttctttttcaagtcaatggttgtcatccggattccctgcgggacaccttctttcagcacattgccgaaccatcctgtccgggaataccccctttcctgttccggaggaaagtacagacagaaaaaggcatcatccaaccgggagatacatgccttgaaacgcaacatctctctccacaagttgcccgccgtatgctcaaccgacacatcaggaatgtattcttccttcagcagcccgtcgtgcctcagagccctgagaatatcatacttctcctcaaccttttctgaaaaccaacccgcatattcctgccagagctgttcagtgtattcctcgtcatcccccctgtacggcgtatcaaaacgaaagaatatgtcatcgaactgccctaccggagaacgttctatttccagaaacctgtccaccaagtccacatcattctgcccgacaatccatacagacagtttccagtccctgttgccgactatgtccgcccagtaatcgactgctttgtaatattcctgtatcacagatgcagatgctcccatagccaaccgaattatgagttaaactttactattcctcccgaaaccgttacgtttccctttccctctatcatcagatttacaccgttgaccgttccgttctttgcagcaacatcgtaatcctttgccgcctcctgtttgatattggtaccgctgctgctaattatactcttttcgctgctgagcaccatacattcgttgccggacagcaatgttacacttttcctgccttcgagagcaatggtatcggcctgcaagcctatcgacttatcatccattacgatgaccgattccgcctcgttggtaagggtaatgcttcttttcgccatgacggtaatggcatccgtgccatccaatatgatcagctgttttcccgtctggtcggtaataacgatgcttcccgtctcatcgtcgaaaacgatggcattgccgctgcgtgtgataatgctcttgaccttgttgtccttgtcccctcctttacctgaaccggaatggaacaccgatcccgtaacataggggcggtccgggttgccatgctcgtagcttaccataacctgatcgccgacttccggaacaaatacccatccgcgattcttggaaaccgcaccacttactcccgcattaggagtctgcaccctgatccaattggttgtcttgccgtttttctgccagtcgaaagccactttcacacgtccctgtcccttgtcgtcgttgttttccttcaccgtagccagttccggcaacgccaacggtcgcttcacatcgggaacaggaatatgtaccgtaccgtccggcacaccgacaaaactattggagtaatgtccgtcacggcgtacctcatgctcaatcccgacaatacggaacttgcctaaaggaggcagtttcatcctgtcagggaaagaaacatcgatgatttcaccaatccttatccggcaagtctttcctatgcctttgatgttcagaagattggcaccagacgcattctttacaatcctcatctgttcgtccagttccgccttgtccgttacatgggggtcggcagccgaggtcgtttttgcagtatatgccttctcagagcagctgtgtgcaatagactgaaggtcgttcatgccatccggtttggcaggcgtatccgcattatgctgtttgttctcctgcgctacataatcgtatcttgcggatttacccggtaccagattggcaaccagacgtacctcctccaaatccatgtcataaacaatcttctccgtattgtccctgtcaggcttgccgaaatacactttcgtcccgtcataatagaaccactccccataaagagccgaaaggcgattcataaagtcaaagacactctcgttatactgcgccatgtagggtatgggcgccgcatacttgggattggaaaccaaattgacctttccatactcctgcgtcacctcctttattatggtagagagggactgatccatccaagaatcgagtgtcctgttgttctcatacagtatcgtagggcttgttccgtgaatggccactccgcctgtctcgcccatgcttccaaccatttccacttgagtgatgattccctcgaagtcataactttcacccgtctgcctatggacaaatgaaatgctggctgtctccccgatgtagccgatgaatttttccggggtctgttggaacgtattgttaggcgacagataattcaccaccacagtgaaggtgtgatgccggttgaaaccctgacggagatgcagtgaaacgaatttctgttcttctcctttcacggttactttagtagccaccaaattcagaaaacttgctcccatactatcttaaactatgattttaaataaataatccgactggtcggtatgttttttggtgccgaaataaccggaattggtatattccggcaccttaaaactttgattaggaaacaaccattagttgttttccggccaatcctgtacaaatgtagcctcgtccatcttcacggtctgtgcagaaatggcgaacttgattgtcatcggataagggttagccacattcagtgcctcttcgtaatccaccacataaccattttcgaacaccaattccttcattttggcatcttcatccgctttcttgaagacgatgtttccgtttacgggctggtactgcttgaacatcttatccagcacaatggtatcgggagttgattcgatttccacatagattgtgccaccataaatgtcagatgccggacggcctttggggtccacatcacgattgaacttaactctccaggtcagtacatcaaactctcttgagtccgaaaacttaaatgacgctttaaatgccatattctcaaagttttaaattaaaaaataagttgattttgaaatatccggtcaaaggaggcctgctacagtcctatctttgtccttcaatttctgcgcccaatatatggcattttctgaaaactacaaagaacttttgatgattttttcttgtttttgccgaaaatatgcccataagcataaaaaaaacactgccaacaatagccgaattattttttttgccttatatttgcaatgttctcctgcgcaatttttaaatcttacgattatggaaacaggagttggtttcatcaatcttgatgattctgtaaaaattgcgcttaacatagcacttgcagtggctcgtgaaaatgcgaacgagtgttatacaccctcgcatttgttgaaggctctacttcataaagatgtagggttaagagattttataataagtataggcaaggatttaggctatctggaggaatgggcggacgtgtatatcgaacaatgcccgaaatccacccagttgtccgaaatcaagccttcggaacggattgacgccgttttccgtgccgcagacgatgcacgaatccagttcgggctgttcgacatcaatcccatctgtgtgctattggcactggcaaagcccggtgtcgctttttccagcgaccagctcaggtctttccccattctggaaaaggatatccattccatatatataggtaacgggcagccggcatgtccttctgccactacggagaagtcctatgccccgacttccgcctcatcctccttcttgggcaaatactgtgtggatctaaccgaagatgcggccaacaagctgcatccggtcatcaaccgcgaccgtgaaaaccgtatggtcatggagatactgggaagccggagcaagtccaatgtcctgattgtcggtgatgccggagtaggaaagacagcactggtttacggacttgcctgggagatagtcagccataaagtgccctcgtttctggaagaaacccgtgtatttgaactggacaacgcctccctgattgcgggagccacctacaagggggaaatcgaggaccgcctgaaaaacatcctgaaagaattgcggaatatcgacaatgcaatcctgtttattgacgaaatccatgtattgctggacaaccgacaaggaaataccggtgcgggaaatgtattgaaatccgaactgtcgcacggcgacctgaccgtcatcggcgccaccaccattgacgaataccgcaaaatcatcgagccggaccatgctttcagccgccgtttcgaggtcatacaggtaagcgaaccggacataaagtccgctatccagatgctacactccgtgcagaaacaatacgtggactaccatcatgtaagaatcagcaacgaagccgtagccgaatgtgtccgtcttgccaaacggtatatcaaagaccgccgtctgcctgattccgccatcggtctgctggacatgacgctctccgccatcaagatggtcaatgaaacaggaaagaagaatgtggagaccctgctatccgggctggatgaaatagaaaaggacgaaaaggaccttcaggaaaagaccgaagaactgaaaacgctgcttttcgtaatgcacaacaaattaagccccatccttttaggagtcatacccgatgaagcggatatccatgaattgcaggagtatgaagaactgaccggctatctgagaaacgcattgaacgtcctcctccaatttgcagagaagaaaatagaggaggtgggtatctatgaggtagccgccgttgtcgccagcaagacaggcatccctatcggcaagatacagtcgcaggaaaaggaacggctactcaatatggaagattatctgaggcgacgcgtcgtcggacaggaccaggccctgaagacattgacggatgccatcctggaatcccgtagcggcatgaacaagccgggacagcccatcggctccttcttcctgctgggacccaccggtaccggcaagaccgaacttgccaaagcactggcggaagccctgttcaatgacgagaaatccatgatccgtttcgacatgtccgagttcaaggaagaacactccgccgccctgctgtacggagcgcctccgggatatgtgggatatgaggaaggcggcatgctggtcaataaaatacggcaacagccatacgccgttgtcctttttgatgaaatagagaaagcgcacccgtccgtatatgacattttcctgcaaatcatggacgagggaaaactgcatgaccgtctgggcaaggaaggggatttctccaactccatcgtgctgttcacatccaatgtaggaagcgagtggctgaccaagcaacttgagtccggcaatgttccgtccaccacccagatcatggaggtgatggggcagtatttccgtccggagtttctggcacgcctgtctgaaatcgttccgttctcccccatccgcgaagacatactcctgaaaatattcgacatacagttcaacggagtcagaaaacttctggacaagcagggtatcggcataaccatcaccgatgatgcccgtaagatgcttgcacacaaaggattcacacccaaatacggtgcccgccaagtggccggtgtaatccgtaactatctgcgcagaccgatttcacggcttatcatcaacgaggagctgggcaaaggaaaaagtctggaggtaggtctggacgaacagaatgaattaacctggaatattcaccaataatcaagtacactatgtttggatataccgtattcttaaagataggcaacctggctgcctcctcactgaccgacatgtacaaggacagctaccagctcatcggttgcgaattcggatttgcccaagggatagatatcaaaggacaggcacagaccgaggtaaaaggcggcacgttttatgtaacctaccctcatcttcccaaccgtgacatgatccagtggatgctggatgcccgtaaataccagagcggagccatcgtagtccatgacaaccaaggctccacactcgaaaagatactctttgagaaagcgacctgtgtggatatggaaatcagctatatccggcagggcaaaagctatattgcgaccaaactgaccgtacaggcacagaaactggcattcggtacagaagagtttgaaaatcagtgggtgttttaaaaacagcagcgttatgggactttttaattttccgcaagtggacagcaacgtgaatgtcatattcagcgttgacggcgacgaatatgcagtggaacagttcaaaataggttttcaccagccagtagataacctaaagaaccaaccggaaggcgaagtgcgtggaggacgaatcatgataaccctttcgcagacggtgaaaagcaacatctacggatgggctgtgaaaccgtgggtgaaaaagaacggggcagttctgttcaagactggaacgtccggaatcgtgtttgaggtggcgtttacgaatgcatattgtgtcaatctgagacgggttatagaggctttgggacaaggattgtcaacaagtctgattctatctccagagagtgtaagcgtgaatggtattgaatttgataatcggtgggtaaagtaatgggcgatattctgaataatagaataataactctagaggattttgagtttctaaaatcaataggagttccatatacaggttatgtcaagggtattggatatacctgtcctgtgtatatgccagcacaggctttcaggattacagatggtaatgtgcaatggagcagttgtgagttacaccctcttttttatcaagctatagatgatagtccagagcgcatctttttgagcatgggatacactactgaagatataattgaaagaataacttatgataatggtaatggaaccataactgttgctgtgggaaaccggtctgtaacttttccaaaagaacaaggtaaggttaatgtgtatttgaatcaggaaggtggtaattattttatttatatagaagctacagattcaaaaggaaatattcttttgagtgattcaaaaacgattcgttcttatatacatgagaaaggaattaaacaagattttgacattacagatggagtgggctttaataaggaaattcttgataatattaatacaggaattggagcttttggtattgggttaggtgcgaaaactgaaataatagattatggaataagaagttttcatggttattcttggaagcagtttaattcactcgataaaaagcagcagttacttaaagaggctcaagcaattggaaaaaccgggactaaatatttaaaaggtatgaaaatgcttggaaactggagttcgtatgcttctgctggttattctgtttccttaatatttgtagaagatggaagaacattggaaaagaaatttgttaaagcagcattagatgtgggatttacctatataggtatattgggaccatggggatttgctattagttctatttactatttggtggatacagctacagatggctttggatattttaatgaataaagttatgcataaaatcttagaatatttgttttataaaattcaagtattgactcgatatatggacacaagtatgtatttaaatatacatgttccatttattatgtctacagtcttattattctatttggcagatattgcaattatatactattatattataatgggatattcaccacaaaaaaatccaagtaatgtgtttttggtggttttcattattatgattttattatggagtagtctctatttttattatcggtataaacatagaaatgaacgaattatggaaagaaaaatttatgaacatagttctaatgtatgggcatatcttttcatatttactccttttattgtattattaggatttgctttattttttagggtgtccagttctacgctctcgtttttggtattgatttaacaacttaagatattgattattaactataacactattgtttttaggtacaattttaacatacaaaaaagcatagctaattcattgaatcaatatattttaaagagatatgattatcagcactttggaacttgcatcatatcttttttgaactaaaagctggaacatcaaactggacaccctatttatttttttaatttcattgtttatgaaagagtataaggtattaataatttatacaatctccaatgatcaatcaaaaaagtcatttgaagaagaactggagagatacggtctggaacgggtcgggacgcaagatatctttgcccttcccttagaggaataccggacaaaggtacaggcattcaaagcctacctgcgagcctatgtacgcaagcatctggacagccaagacacggtactgttcgttgaatcacgcatgaacgaggaacggaccctgaccgccatgctgcaaaccaatctgatgagtgaagaagaataaaataacataaggatatgagtgcacaatcgtatatcaagttctggacagccgaaccctcggagcatgaagaagtgcaggcatacgacctgctgggctacgagtatgacttccggaaagaaaccactcctaacggaaaggtaaccgggaagacctacggcggtaaaatacgggtaagcattgccggatttcctacagaggaactcttggaatggatgttcaattcaagaatcctgaaggacggagaggtgatgaacacttccggcctgcccggtactcccaaagagatcatccgtttcaagggagcaaaatgccttgatttcaatgtgcattcaacaaccaaagagagccgtacctcactattcatccacttccgggaaatggagaccggcgattcgtgtcacttaaacttataatcatgaactggttcacttcattgttcagaaacaaaaaatcctcaatgccggatgaccgctacgtgatgcggctgtccgtctgccatgagacatacagcattgaagagttcgacctgcaattcaagcggaatacagaccgtgacggattgcctgaaggtgaggcatacggcggattcgtcacctgtaccctcagcgggatgccgggtgacgagctgttgagatgggccgcatacagccactcccatgaagacggcgaaatacggatctacctgaaggagcaacccgaccaacaagcggcatttgccttgcgctttgtggaagggaactgcatccgtctgcaacgcaaggttgaccgtatctccaattccagcagcatcgtccttctgtttgccgcaagaacactaaaattcatagacgaagaatttgaaaacgaatggcactgacaagtatggaaacaaagttttgcaaattgcccctggattttgaagccttgctcagcgaggatgtggaaaacagccgtcttgcatcctgctcggaaatcgagtccatcgaccagtttatcgaactgctgatcagtacggctcccggcgaacatgcctttgacaaggagttcggctgtgagatcttttttctcgactttgaaagcattgtctcacacacccgttgggaaggacaattctcggaatacataaccaaggcaattacccggcacgagaagcggcttacgggtgtaaatgtacgtgtcatcattgatgacaccacccgacaggacaatgtatttgatgctcccgccgtaaagaaacgtgtacaagtatatgtatatggaaccctggtacataccggagaaaaacggtgtttctattatgtaatctatttaggaccgatttcaacccgatgaaaggattatgagtacagaaaaatacaataaagagcaaatcagaaaccgtatgctgaaatacgctgcggctttctggggaataaaaaaggcggaaaacttcgacccggttgtcaagctcctgctggaagcattgtccaacgagatatatatgctgggagaggattttaccgccatcgagacaaggctgctggaaaagaccgcccgaatccttaccccggacatccttacctcaccctttcccgcacacggcatcgtacacgcctatcccatagaaccgtgttacctgataacccgggaatcgggcatgtattacgagagcgactcgcttacccggaagctatcgaccggaagcgtatcgttttatcccgcctgcgataccctgctgcacaaagccgacgtgaaatatatggtctgcgacgaccttctctaccggatagcccctaccttggagaagaccatgattgcccgtgcagagacaaggatgtctccgcgtaccgtctggttaggaatggcggtggatgaatccatttccgaccttgaagacttttcgttctatctagattttcccaaccttacggagagctatgaatatctgctcctgctcccctgtacggaatggtccgtagaagggaagacagtcgtgatggaagggggaatccatgaaaagacaaccatacagaaagaaccaacccgtgcctttttccaagactatgacgtaatgtccgtcatagacaaggaagtcatggatatttacagcaaacattttctgaaggtatcgcagtcctttccactcgacggttcctgcaggaaaaaccttccggacaccctgcggtcctgtttcaaagaggccgttctggagaagatgcaggacaagctggtatgggtgaagatacagttccccgcccatttcacaacggaagtccttgaagaacttcatgccggcatcaacatcgtgcctgtagagaacaagacgcttcacgaacagacgaccacccttgaggaaactttcagggtgatacccttgcgcacgggcagctacgaatcccttctgtccgtacacagcgtgaaggattctgacggaaagaactaccatgaactcctctattccgcaaaggattccacggaaagctatggaacctactccatccgcaaaggaggatgcgagcgtttcgactcccgttccgccaaggagctgctcggctatctgtccgacctgctggatgacgagacccatgccttcaatgccgtatcaagcatcaagctacaggcacttaccatccagatggagcagctgatggcgcaaatgaaacagacagcggacaacatgaacgagttcagggaaacaccttattaccttatgattgacgaattgtccggcaaggggcagattaccgtcaaatactggacaaccaactgtgaggtaggaaaccggatacaggcaggcgtaaacctgtcccccaatgccaccacttacctggacccgaagacactggctctggtcagtaccacctacggcgggaaacaagccccccaaaacagagaacggattgacatctacaaatacgccttcatttcgcacggccgtgtcctgacacagaacgacatagccagcttctgcaaaaaagaactcggagaactgctggtgcggacagaaatccggaacggggtggaaatcagcccgatgccgcacgaaggactgatccgaaccaaagaagtccatctgattcttggaacgaaactggatgagccttcgcaggaaaaacagataaaagacaatctgcgtaccaaactctcggcctgttcgccggacacattcaactaccggatattcatagaatacaataaagcataaataccatacttatgaacccagttacccaacatctcatttcatcgtacctgctgatgccgctgctgaccgtgattttcggaatcgcggcctattttatcgcacgcaagaacaaactgctcaacaacaaaaaactgattgcgtatctgctgctgtgcggcataatccttgccctgcccggcctgtccggattcatggactataacttcatgccttatgcctacatcctgctggtcatcctgtactggactgccggatattacaaccggctcatccttcgcaaagtgttcgcgtcaagcaaggaaatgccttctttcggcatccaatgcctgctgacggttacggtcatgcttctgggagccggactcttttccgtagtgttcaacctctgcaacgaactccagtacggcatctgggcctccacctgcctgctgccctttgcatttccactcctgtattcccaaacggtgaacagctatttcgacatacccattgaaatttataaagtatggaaatattcggaggaatatgactcggataccttgtacatcaaccgtgaacggagcatcgtaatggatgtggacatattccgcagggtggatgaccccgcatcggaacgcataaccggcaaggcatccgaggatgtcatcttcgggcagtggttccagcgcatgattgacgactgcaacctcaaatcaccgtcttcgcccatcgtatataagaatgaaggaggagcctattacgaatgggtattctataccaaaccgtcctttttcaagagacggcgctatatagaccccgacgttacacttgccggcaacaagctgaaaagacacgatgtaatcatagccaagcgtgtggcaaacgaacttataaagtataacgaatattaaatagaaacattatgataggaaaacagagccaaaagaaaaaatatccgctggtaaactgggcggacggaatgcccgtcaacaaagggcatttcacccaacaggaagaccactttacggaccggttgtgcgaataccagtcgtttcatctgaaccgcaatacctacggactcctgccattcaagaaaggagaaccggtttccggcgatttcagcattacggaactcgttacaggcaccttggaagtccgattgaaacgttgccacgcccttacttccggaggttacctgatagattatgatgccggtgaggatgacgaactcaccgccagtttccatatccctacagaagaggaagaagaaaaggacaagcggtgggatgtcatactgatggcagaccctttcgagcatcttccttcgggtattccgaacgagaaggaaatcagtccacgccagcccaatgccttacccaaatatgcgttgagcgtgctgccgagcggacagaccgacggaagcgagctgggaagacactttctgctgatcggccgcctgcgcaagaacggaaaccgctgtgaagtggacggaaacttcatcccgccatgcacaagcatgtccagccatccggacctgaaaggctactataccaaattcgggcaactcgtggattccatagaaaaagcttcgtttgacatccttgccaaagtggagaatgcagaaaaacagaccagcctggccaccaacatcggtatgctgtgccgccatgtcatgctgttcatatccgatatctacttctccttccgcaacgaggggcaatactattcaccgctacacttcctgaatgtattctccacattggctcaccgcctgtatgtatgcctgagtttcatggacaaggaagacaaggaggacctgctgaaatacttcaacgaatggaacggcatcactcccggtgcctacgaaggcctgctgagggaaaattgcgggctgctgtacaaccaccacaatatccgccaactgatggttacggcggaacgtttcctatacctgttcaatgacctgtggacaaccctcagccgtctggaatatatcggcaagcacaaggaaaacatcgttgtcgccgaacgctccagacaaccgaaagaatcgagcgagtcacgctggaacatactggactaatcccctataagcgaacggacatgacggaagaacaagataaaatagtacggtttgacgaacattcccattcattcaacctgccggataccgacttcaaggcggaagtggtggccagcggactgaaagaggccgggtatgatgcagagcgtaccctcatattcagacggggagacatccggcgcggattctcgaaagacatccatgacatccacccggaatattcccattatgacctgacggattacctgtatctttatgtgaacaggagaagcctttatgacgagctgcccgaaggcatattccacaagaacctttaccagtccgagaaaatatcgaaggaacaggtgctggacgaaatccgcatccaccgcgaagaggaatttttcgcccgccgtttcttcaagcctttcgaaatctccctggaccatatgctggtagccttccagaataaggaacgccgcattgacgagatgaacgtacatccggatttcgtaagcatcttttccggtcaatggcccgtactggaactgctgccgacccatctggcggtcatgcttatccatatgctggcctatatggaacagattacagcgagcctctccaaagccggcgagtgcatgaccattctgaccggtgtgcccgtgcatatcaagagaggagacaaatgcgtggtggaagtggattcctgccttattcccaaattgggaagctgcattctgggagacgacatggttctgggaaacagttttgccgacggcacctaccagatgctggtagaaatcggtccactgtccgcccgacggatggagagcttctttcccggcgctgccgacagtaaaatactgaatgcgctgacagaactgttccttccctcggacaaggagatacagatccgctacatcatccagcaggaagatgcccggttcaggctgggaaccccaaccgaacaaggcgcctatctgggtatcagcacctatttatgaatataaaacatcatcctatatgaaaccgaaaaacaacacagaagtaaggaaagcctatctgagattcgcgggctatctgacatgctgcaccatccttgcggtaagcatctttgcctgtttcctgaaaacctccggcatagaagtaaagcgaatcacggagcaggcactggaatatgaccatatctatgccaaagagctgtccctgtcgaacagcatggactccatctaccagtacatgaaactgatgaacacttcaccgcaaataaacgacaagctcctgcaaagcgttgtcagtacgcgcaagatgaacctgctcaaatatgtccaaggcatggacaccaaagattgcaggctttacaggcagctgctggaaaacctcaacatcttcctcggggtaaaagactccatccgtctgctgaatatccaggaagagatggtgaagaaagacctgatgcagtgcatccaagacaactggaaaacaaggcgtaacctgaatgtgggttccggcggcaacaaacaataaaacggaaagccatggacaacaacagaaagacaatgaacaaacgggaaatattcatgggacatgcctatgtattcctgttctttttcctgacaaccgtagcgtgttgtctggtaatcttcatgtggaactcagatttcaagatgtttgaacagaaagagttcgtaaagatcaagatgaaccgcatcaaggatttccagcaggaacaagcggaaagccagttgccggtggactccctgttccgtaaaatagaaacatttgaaccgggcgtttacgcccagtatgaagaagacgacatccattatctgataaacaacctgcggaacacatacgaaaggaacagctgggacaagcgatacaagctgttcatgcacattgccgacttttatgccatgtggctgtccgacaggaaacagctatggagtatcggacaaaacataagtctgttcaaagccaatctggaggagtgcgagataggcttgcagaaaaaggaggaagacttgcgctcaggaactaaaaacaaatgacatgggaaaaatttataccagaaagattctgttcgtaatcgcagccatgctgctgtgcatccttgtcgccatactgatccggctgttcttttccagccgcaccgtgcgtatgacactgacccccatagaggtggaaaccggagaaacggtccattatgcagacagcacccgcaacgcacgctcctggctttgggaattcggcaacggggacatatcacacgaacggagcggagaatacgtgttcaagaaaccgggacgctaccaagtgcgccttcaagtggacggaggactggaaaggaaacagatcatcacagtacacaggagccgggatgattacggaagcgacgagcttgtcaggatgaaagcaccggcaaccgcctttcaaggagaaatcgtatctttcaaaggatacggtccgtcgaaagaatggcgctggcagttcggagaatccggaattgtcgattcgcgggagcagaatccactctacgcctatacagaacccggcatatacgaggttctgctgactacggagaatacccaatatccggtccggcacaccattgaaatccttccccaatatacggagaacgactcgacagacgtgcttgtcatcatcggcaatgacatccgtgaacacttgcaagccatcgtggacggcaagccgttcaatacccattacaattatatcctgaagaaatacctttgcggaaatccggacatagcggtaaccgtcaacaacagcaagaagaatgatttctattcctattgccaaggactgaaaatcatagcacgcaggaaaacccttatagacgaggtgttcgtcgatatgggagacaacctgagcaacgaatgtgtgatgcagctgatggtaacacagcacgaacgcttttccgaacaaaaaaacaaatgaggcatgaaaaagaattgcatatcgacactcataaaaggaggatggatttgcgggtgcatcatctgtatggcatcctgcggaccggtacaccgttttatgcggataaagaatgtaccccgtgaatatatgcgaaactattccatagaaggggtaaaggctccccgcagccagacactgcccaagcataccccgtggattgtctttgccaatgaagcaggaacatcctatctgagtccgagcggaaagaacgagatgcagtctgtgaaatacatggacgcatttctcgtcatcaagcgaaaaggagactggctcagagtcattcaatacgacccagccattctgaaaaacgggaaactgaaagaatggaaacaggcaaaatactgcggatggatcaaccaaaacgacctgttgctgacccggagcggctttaccgacattgttaccggattcaaaaacaaacaggtggtcatgctgaacgacagcgtggcattggccaccccaaaaacgtattttgccaacgactccgtaaaactgttcaaaaatacagacctgacacaagaggctggcaagattccattttacagtgtcgtatatccttatcaaatatcggaagacaaaggatgcaccctcgtggcagacaagccgcagcttgacgcagacagcatagggcatgctgtcatcggatggatagacgaacgcctgctgaccgcccccgaacagcagctccatatagacataacctcgctgccggacagcacgcttgtttttaaagacagggaacggaaagacaccttgccgctatcatccaacgacctgaagcggaaactgcaactttcggccagccagcctgctatccgctacagcccggtactgtcctaccggaacaatgacacgagcttctgcttcaaaacccggcttccgatgccggtcatcgacaaacgggaaagctatgtgctgaatgtcaacggcaatccaatctattacgggactttcaaaaacaagatagagaaggacctgcaaaaaataaacctcatgtttgtcctggaaggaaaagagaacaccatccaacggtttccagccgtggtgaatgccatccaaggactgcaatcgcaactggtgaatgacgacagcttttctttcaggttcggtgccgtgcttaccttcaacgaaccggacagccggaaagaccccatctgcaaactgactcccgactacatggagctgcttgatttcctttccgccaaagcacgtaatgccgagcaactgaaacctacatacggacgattcggcagctggtccggccttcggatcggagtggagcaattcaacaaatgtccagatgaaaccaatatcctggttgtcatcggcgataaagggttcaacagcgagtgggcagactccaccttggtgaacaagctggtaaaaaacaactgccgcatgatcggcttccagctctacggaggagaaccggataacttcaacaacttcgtgctgcaaatcgggaacatgatagattgctcggcaccacgcatcagccggaaaaaacgggaactgattgtatatcccgaacaaatcagaaatgaaaacgaatatgcggaggtgaaccataacacctattgtctggactttccaaatcggagcatgacacagggatggctggtgtttccgcaaaagaacgaatcgctggaactggaaggactgaccaccgccgtggattccatgctgatacaagtgaagtttgacaataccctgctgagcaacagtctggcaagggcattcgacgaagtgggtacacaccgatataggacagattcgacaatgacagcttattaccatatccgccagtcgggggtacaccccatgctatccgtacttccggataccgaacctgcctggagcctgcctgcacagccaatcgtactgccggactcgctgtcctccacactggactattatctgcttgtcaacgaagaggagttcaaacggttgagaaagtatgtggaagcaccctccaagctgatcgttgactataaatacgaagcggtcaaaaagaaaaagcaagcgaaggtggatatctgcgactgtccggacgactacctacaggcagatgccgaagaatctaccgtacgtgtaaagacggacagcctgaacgcaccggaatatgcctcaacccgccgtgcaaggagaaaactggtcagacatttcctttcagagcgcaacagggacagatattgcaaggtagggagaaagactttcctgagaatgcccctatcagaggtcttgcaaaggtttacctcctgcccgaccgactatcctttctttgaagtttaccgtgtcaaggacttgcggaaaaagaaaatgattacggatgcggagctggacatgctgattgaatatttcaaggaaaagaaaaaactgctggacgaagccgccggcaagccgttccagtccaacgggcagacatactattggatcagccgtgacctattaccatagtcattcacctgaaactgtattatcatgatttatgaaactattctgaaaataagaggaatggaggtgccgatactctattataactatcggtgccacatccggcactatgatgacccgaatctgagaaaaatcatacaactccacatccaagtatgcgaggaaatcggcaatcgggagtgtctgccggtcgagggagacctgattacgcttgcgtttgagtgcaagggtgaagaacagttcttctatgactggctgaacgaaggagccatgcacaacggggaaatccatttcatctacaacgaagtggagattgcggacattttccggttctgggactgcttctgtgtgaaaatagaagagtatatgagtgtaggaaactctccgatgatgatggtgctgtatttgtcaccggggattatcaaaaggaataatctggaggttagggagaaggtgtggaaggtgtcggatgtttcaattatatatcaaacttctaccgagaggaaagatgattcggttagcaatgattcaaataagaaaagtctttctgtaatttttgtaaaacctccatttcaattaaagaagaaatttcaaaaagatccattttatgaaattgaaatgaggaagcaattgcaaatgcagcaggatggaataaataatatgactatatttgagtggctgaaaaatagggagaattttaaaaaatatgggcgtaatcctaaatctaagaaaattcaagaagattttagggatagatataggaatgctaaaattgatgagtatcttttattgtatgaagatatggatattaaggctatagaggcaatggttgactcagaattggaaggcttagcagcattacataatcctgatcagatagcaggaggatatgttgatgtggtgactcaaatgggaaataaaagaataaattcgtccattgggtcacaatggggaagtatagaaaaaggtcgttctcttaatattgaaaatgaattgttaaaattaataacagaccctcctcctataacagaagaggagcagaaaaaaataaagatgaatgtaaatttagttgaaaacttagaaattgttaagtagtatgtttgagaaatttttagaaagaagtggaaattctataaaattggaagagtttagtgaggattatatccgacaatacaataatttggtttcggaaaaactaatttctttttggagaatagctggtattggcatttattgtaatggcttgtttagaactattataccgaatgactatcagtatattatagaggaatgttatcctatgtatgattatgaaacagtgactccatttatgataactgtttttggagatatttttgcttatgttaagaatcatgtaattggagattacgtcgtttttattaatataaggtatggaacttttaaaattctatcagaaaatattgacatattgttaaatatagtaattttcaataagagttgtcttgaaaattggtttttattgaatgaatataatacaataaaggaagtgaaggcgatgcctaagatagatgaatgttatggctatgttcctgctttagttgcaggtggaaaggattgtattgataatattcaaatagtaaagattgctccttatattgatacggttattcaattaatgggcgatttaaaaagaattagataatatcaaatcaacacatatgttacagaatgtttttaaggttgatacaatagtttatgtttcaattaatttaaattatgattatagtatatcttatatggaaaatatagcccggaacttcacgaagaagtatccaagctatcttatccataagaaaagcgaagacaagataaaagcctttctgaccgacagggtgaagaccaaagtggaaacctttgtgaatgcagaggcaaagaacgtggcagtaaccgaggtgcgagaaatagcagacctgatagcggaatatgaaggtgcagaaagttcttcatcttttggaccccatcctacggattccccctctttaggaaacaccggagtggagcttgccatgagtgtagacacaggcgcatcggacatccgtcctgtcaatgtagccaaacccacgggggcaacaggaaaacccaagataatgaaaagaagtgtcatccgtgtaaccatggaactggaagtgcagatggaaaccaaacaatacttgcaattcctgcaacagattccagacctgttcagcctgcatgaattccccaatttgagatgccgcgtgatatgcaaccagaaaaaggcaacaatcaacgaagagccagcaccggttgaagtgaaggttttggatgacagaaaataccagcggtggtttgttgcctttacactgttgatggtatgctgcatgggcggaatcatagccctgttcttttccattccgaacctgtacaaacaggacatccacttcctgcggaacgatacgattcatcaggagttttccatttccaacagccgtattgacttgaaggatgtaagcctgacgaatcatggcgggaaagacacacttgtcatcaaggataaaaagataatcatagccaaataaaaagcaatggaaaattcgattcagatacaagggataagaaacatgctatcccatagcggatgcccggaagacctgctggaaagttacctgcaattcctacaaaccgaaggccaacaggtgcagattgtcagaggagaagtctttatgatgtttgaaaaggaagcgcaataccgcaagagaaggaatgaaaagatgaaaggaaccgtaactttctgcaaaaacacgaagaacgatacaggggaatacaatacaggagtgttcatcggaatggaatttatccaatgctgcttcaaccatgggattcctgcacgggtgctgaatgtgcggagagtacatggggaagtgacggagattgtcgtggagttcgggaagtagatgaaaggaatacccctattgcagagctccgacctaataatatgtgggggaaattgatgggaaaatccccccacacacttcatcttgatatttaatgagaggaaggattactccttcttggatgttttttcattatccagccccaatcgcttgcataactccggatcgtttttgatacggcccatctcttcgttgatgatggcctgcgcgtccgacttgatctggtcgtagttacgctgaatctgctgcatcatgatgtcattaccgtccttgtccttgaattcgttgatgaaagggattttcctgtaggccttttcttccgcactgaccgccgcatggtctacaacaatttcggcatggaatattttctgttctatcttctcgccaaaattatccgccacagccccgacaaacgtaccttgcgacagattggcaatcttggatgccgggataagcgagtcaagctgcgtgttgatggaagtggaaacatcctgacggttgatggaaacggactgacgctgctggagcaccttgccgaagcgttcagaaagtgtctttgcggtttctccgaccacctgcccgctgaatatatttcctaccgtgttctgaataaccttggactccttttcaccataatcgcgggtcagctggctgaaatcctgaaaacccaaaagtacgcccaccttgttgcttcgtgccgttgcaatcagattgtcaagcccccggaaataaatggtgggaagctcatcgatgattacggcacatttgagctgtcttttcttgttgataagtttgacaatacgggaattatatagtccgagtgcagccgaatagatgttctgcctgtccggattgttgccgacacaaagtaatttgggttctttcggattgttgatatccaacgaaaaatcatttcctgtcatcacccagtatagttgtggggaaatcatacgcgtaagggggatttttgccgaagcaatctggccctggagctgatcctgcgcccctcctttccatgcatccatgaaaggagaaaggtagttttccaactccggataggaagtcaggacggtgaacaggtccgaataaggcttgttcagtaattccaccgcatgcgggaacgtacaataaatcccgttcttgtaaatcttcaaataccagattattgcagcaagcagaatgatgggggattctacaaaaaagtcaccctgcttttcaatccaggtgcgattgaggttgagcattatcgtatagctcgcctcgtacgcatcggaaatgtccgtcataaattccggattgataggattgcatcggtgagacctgcgcggatcgtcgaaatttatgacatagaaccggggcttgacctcgtacttgtccatattcttcaacaaagaattataggctatggtggacaggtcatcaaacttgtaatcgtagatgtaaatcgcaaagcccttggctataagctggcgtatgtaactgttgactatcgcataggacttgccgctacctggtgtcccgataaccatgcaggcacggaaaatattgacaatattgacaaatccgttattccagcgttttttataatagaatctcgttgggagatttaccgaatactcattctccatcagtcgggtttcctgcatgaaactctcattttccatattgaacacatcttccatgaggttgtgcctgtaaaggcggctcatccatagccccgacatcagcagggcgagatagcctgccgtaagagtaaaaatatagaatgcggtatttgccgcgtgcggcaatggcagctcaagcaaccaccagtttagaaagaacagtgcgcatcctgccaccagcgccgcataaattttaggccaggttatcttttcacctttgactccgtgcgtacccagacaggaaacggccagcagaagcactgccaacagtttgctccagagaatgcagttgaaaatcccggtcgtattattgaaattcaccagaatcctgtccatcaccgcaaggttcaagtgccacgtggtgatactcggataacaatacacatagacgtgtaccaccaaaagaaaaatactcacggccctgccaaattccatgatcttggcaagcgccctcaaatcgtcttcctgctgcataagaattgtatataaatgggttgatacttgttttgtctaaatgccacgtttgcgtccggtcttcttctttttcttcatgcggcgtgcaaaggcttcctcctcatagtcacgcgggttggtttccatcgaaagtatgcccgccgccagttcgagcgtgctgccggattcgtggcggtgatgctgccgaagttctgtagcggaatgtccgccccgttccttttcgggtatgttttccaaccatttgaaatagtcgttgaacacattggcggaaaactccttgcccatgcgtgaaccgttgaacacttcccgtcggtcgtggtcaatgaaggtgacaccgtagatacgtccccgctcattctcacggaacaccacatcgatatttttttgccccagcagttccacaaaccgtttccgtgaatccgcctgccgcaaggcacgggcgatgtccgcctgtatggagggtgcccattttccctctttgagagctttcagattcatcaacatccgcttttccaacagttcattcccgaagcgttttccgaaacgtgaactcttgaacggcggactgaccaccttgccggtatcatccgtggcagaatagacaatgccggtgtagggtatgccggtgtactcccccctgacctgtttcgcctcgatgttgagtgtggaaagcagtgcgctgtattccccgaaagtctggaaacggtagctttccagtacggctttaagggtgttgcctacctgatggcggacatcccccaaggaagcatccaccttttttagttccgctttcggattccgcctttccgtgtccgctccgttgcgcaagccgaaatccgtttccagttcccgacaggcggtcatggaacggcggtgctcgtaggcgtcactgatcttttttccctgtccgtctacacagacactgacgatatgaatgtgggcattatgggtatcggcatgtttgtaggctatgtacggctgattcccatagcccattttctgcatataccgttccgccaactctaccaattgcccatcagtcagctggtcttccggtgccggagaaagggagatatgcaggacgggcttctccgtattgcggtttgccagcaggtagttctcaaaagagagcaatgccagacgtatgtcctcactgggcaatcccaatctgtcggaaatcatgcggttgcccgaaagaatctcggcggtacctgccgttaccttgtcgtagttataggcaagtgctccgtaaaggcttgttccgtgacttatttttgcaaccatttccgctcgtattcctgggttagcaccatgacttttttacatacaagcatcagttcgatgctcagtttctccaacctgtagagcaatgccatcgcacgtttttccccgaaattgttcttcaaggtccggacaacctgattgtagttgtttccgacggcctgaaactgcctgtggaattcggtcagtttgatgtagtagtccattgtcgccttgtcgattttcacaactttaatctgtcccgaaaagatggatttcttgatgaacagcgtgcggtccccggctcccgaatccgccagcaatttttcaaatcttgtgttctcctcggcgttcaggcggaagctgtacttgcggtccgccggatcactcttgggctttctgcccgtccttgtccctgttgttttctccatgcacatgagatttttggtttgtacttttttctcttccggaatccgcgactttggagcggattcccccggcttttagccgggctagttgtttttgtcggacaaaagactttttgtcggacgaaaacacaacttgctctgttcgcttgaacagagaaccctccttcgtcggattgctgcgcgacgttcacggaacgctgtgatccgacgaagtcagttcttttccatcgtctgattccgattttgcaaaattagacagtgataaccgattggtaaacagcgtttgatatgacatttgatgacatctgatgacatctgatgtcaggtaggggaaatgttggtggaagtttcaaaaatagccgctacttttggcacagtgcatgagggcatacattgaaacattgtcctgtaaggggtattgcttgcctgccacaggtggtgcatggtgtgaatgcggcatcatccatatatgtgcaatgccatatatgctgcacgacaatcctgcatgacggaatacattgcatccgtgcaatgcagtatgggatacattgaaccccatattgcatgaatgcaatgcaccttatatggcaatgcccatcggcaaccggtattacactggtgcaatatggtatgcaatgtattcatgcaaaccggcaaacaatgcgtcattgccgtataccaacggatgcattgccgtgtgatgaaacgaaaaaatccggacagatatgaaacaaattatacactctaaattcaagcctatgaagaaagaacctttatttgtcgctttgagcaaccagaaaggcggtgtgggaaaatccacgttcacggtattgctcgccagttacttccattacctgaaggggtataacgtactggtggtggattgtgattatccacagcacagcatcagtaccatgcggaactgggaagtgggaaacattgagaagaacgtgcatctgcaaaaccagctggtggaacagttcggagcaagcggtaggaaagcctacagcatcctgaactccactccggaagaagcccgggaaacggccggacgctttcttgaaaaatcggagctggattatgatcttgtcctttttgaccttccgggtaccgtaaatgtgcccggtgtattccagtccgtaatcaatatggattatgtattcacccccatcacgcaggaaagaatggcaatgcggagcagcatgtcttttgtccttgccatccgggaatacatgcaccggcataaggatgtacccttgcgtggtatccatatgttttggaaccggatggacaaacgtgtttccaaagacctgtataacggctatactgaaattttccgttcgctgaaattgccggtactggaaaccgtcattcccagtgcagaacgttacaaaaaagactccggaatgaaagggcctctgttccgcagcactttgttccctccatcttcctccgcaatgaaaggaagcagtctggacctgctggcagcggaaatagaaaccatactgaaacttcaataaaaacaattatgactaccaaaagaagaacggattaccaagtggatgaggaggcattgaaacgcatgatggcaggagatgtgaccgctttggaaagaacggttcctccggaagaggagccggaaacaaaaagtcaggctggaccttgttcggagaaacaggagaagaaaagcggttcttccagacagcaaataaaaaaagcaccggatggagcggctgattcagatgaataccggagccggtttctgaaagtgaaactgtcgggagcaagaaggcagacctatattaacgatacattgtacagaactgttgccaaagtattgccggtcattgcaccggaaatgtctgtccccatgtttttaggaagtgtactgtcagaccatctggaaaggtatcagcatatcatcaatgaaatatataatcaagaagcaactcaaaagccaatagaatggaagaaatagtttatttatcaatacggttcggctgtaccgcttatctgttatataaggtatggaaacaaaaagagagaataggtaaaatctgtgatctgctttgtactcctcgcaatcggccacaagcagaaaaagacaacggtgaaccgggaaatgcacaggatgtgatgggagctacccgctttgtctatctggacgagaatgccgggaagaccgtcgccccttacatgagccagcaactggaaaccggaagtgattttatcggagcggataaggatattccggaagatgaagtggaatgcaaactgcctttggaggagatgagaatgctgaaagatgaacaggaggaactggacagccgctctcccgaaacggaagccattgctccgatggttactcctgctgacctgctcaatgtaggcgacgtgctgcttaacctgaatggcgccggctcggacgagaacaaatcatacagggcggccatgacactgcattccatccgggaaacggacatgtttgaactgttctcctcccaggtggagaacaagaagctgattgaggaactgatggggaagtatgtggataaggaagggaatgcgttgcctttgaaaagagagaggaaagaaagcaaacatgttactgactggaggaatctagtctgaaaaggcaatatttatcatgttcggaaaatcctgtatgcgttaaagtatatgggattttttatatgatgtacccatttaacgaaaacatgcaacaggcattcttccaaagtggaggaaacctgttttttctttttcatccgttgtacggcaaagacatctgatgacatttgatgacatctgatgacacctctgaatcatagcgtattatccccatttatctttgttgtcgaattcaaatttatgtcttacccaaacgattcgacaatgaaaagaagaatccttttttctgtgatgtgtgcggtcatcgccgcaaacacctttgcgcagggccagggccttgcgggtatcaacgaggcaaccagcctcatgacctcgtatttcgatcccgccaccaaactatgctatgccatcggtgcggtgcttggtctggtaggcggtatcaagacctatggcaaattttccagcggagatcctgacacttcgaaaaccgccgccagctggttctttgcctgtatctttctgatcgtagccgccaccatcttacgttccttcttcctctaaagcctatggaatatccggtaaacaaaggtgccggcaaccccgtcgagttcaaaggactcaagtcgcaatacctgttcgtctttgccggagggcttgcgatggtgctccttatggtagtctttctttacctgacgggggtggaccaatggatatgcttatccttcggaatcctgtccggcagcctgttggtgtgggtgatattccgtttgaatgcccgttacggtgaacacgggctgatgaagctgctggctgaaaaacgacatccacgctatctgattcaccgcaagagagttttcagattattcacaagaagaaaaaaacaacaatcatgagaaatgtattaaaggcggaaacgctggaacgcagattccccctgctatcggtagaaaacggctgtatcgtgagcaaggatgcagacctgaccgtggctttcgaagtggaactgcccgaactgtacacggtaacggcagacgagtatgaggccatgcactcctcctggatcaaagccatgaaggtattgccggaacatagtgtcgtctgcaaacaggactggttcgtcaaggaaacctaccgtccgaagaccgatgacggagaacagagcttcttgacacgcagctatgagctgcatttcaatgaaagaccttacctgaatcacaaatgctacctgttcctgacgaagacaacccgcgaacgcagccgtcggaagagtgacttcaataccctttgccggggattcctgttgcccaaagagataaccgacaaggatgctgccgcccgctttcttgaggcggtggaacagttcgagcgtattatgaatgattccggacatataaggcttcgccgtctggaaacagacgaaatcaccggtacgaaggaacgtcccggactggtggaaaaatacttttccctctcgctgaaggatgagaccgccgtattgcaggacatctgcctcaagcccggcaggatgcgcatcggtgacaaacgcctctgcctgcataccctttccgatacggaagacctgcccggcagactttccacggacatgcgctacgagaggatgtccacggaccgcagcgactgccgcctctcctttgccgcacccgtaggactgctgctgtcatgcaaccacatatattcgcaatacgtgttcatcgacgacgcacaggaaatcctgcagatgatggagaaaaactcgcgcaatatgctctcgttgtcaaaatacagccggagcaatgccattaaccaggagtggacggagatgtatcttgatgaggcacataccaaaggagtgcttcccgtcagatgccactgcaacgtcatcgcctgggcggaggatgcggaagagttccgccgcatcaggaacgacacgggcagccagctggccatgatggaatgcacgccaaggtataacaccattgacacaccggtcatctattgggcgggaatccccggaaatgcaggcgactttccatctgaagaatccttttataccttcctggaacaggccgtatgcctctttgccggagagaccaattacaggagctcgcccagtccgttcggcatccggctggcagaccgccagaacgggataccggtgcatgtggatatttccgacctgcccatgaagcgaggaatcatcaccaacagaaataagttcattcttgggccttcgggcagcggaaaatcctttttcaccaaccaccttgtccgccaatactacgaacagggagcgcatatcctgctggtggacactggaaacagctaccaggggctgtgcaggatgatccatgaccgtaccaacgggaaggacgggatttacatcacgtatgaagaggacaatccgatatccttcaacccgttctacaccgaatccggaaaattcgatgtggagaagcgtgacagtatcaacacgctgatactgaccttgtggaaacgggaggacgagtcgccgaaacgttcggaggaggtcgctctttccggagcagtgaacgcctatatccgaaagatttcggagaaccggaacatcagaccggacttcaacggtttctatgagtttgtcgccgatgactacagaagaatgattgaagagaaaaaggtgcgtgagaaggattttgacattgacggttttttgaacgttctggaaccgttctaccggggcggagattatgacttcctgctgaactccgacaaggaactggacctgacaggcaaacggttcatcgtattcgaactggacaatatcagcagcaacaaagtgcttcttccagtggtgacactgatcattatggaaactttcatcgccaagatgcgcaggctcaaaggtatccgtaagatgatattgatagaggaatgctggaaagccctgatgtccgccaatatgagtgaatacatcaagtacctttttaagaccgtcagaaaatatttcggcgaggctgtggtggtgacacaggaggtggacgacatcatcagctccccgattgtgaaagaggccatcatcaacaactctgactgcaagatcctgcttgaccagcggaaatacatgaacaagttcgagcacatccagcggctgctcggtctgaccgagaaagagaaagggcagattctttccatcaaccaggcgaaccatcccgggcgcttctaccgggaagtatggatagggcttggaggaacctgctcggcagtatatgccacggaagtgagcgaggaagaatacttcacgttcacgaccgaggagtcggagaaactggaagtacaacggattgccggaggaccggagggcagtctggaaggagccatccgccgtctggcggagaaaaagcgagaggaacagaaacaggtatcaaacccgaaatgaaaacgattatgagaaacagaccccttatgaggctggcggtatgtctgataagcatggccgccatgatattacagagctgttcggaaagcggtatcgaccgcgacaagatctgcggaacgtggaccagcgtggaaggcagacctgacgtgctggtatacaaggaaggagaatgctataaggtgacggtgttttcccgtagcgggagaacccgaaggctgaagccgcagacttacctgctggtggaagaaaacggaaacctgtttgtcaatacgggctaccgtgtcgatgtgtcctacaatgaggcagtcgacgtgctgacattctcaccgggcggagactatgtaaggaaggaggaacgggcatgaaggcaagaacgcttctgatcggaacggcatttgtactgggcgttaccggagcacgcgcccaatgggtggtgacagatcccggcaatctggcccaaagcatcataaacatgtcggacaatatcgcccatacctcaaagacggcagtcaatacggcagaaagctttgccgagacagtaaagatctatgagcaggccaagaaatattacgaccagctgaaatcggtcaacaacctgatacaggatgcccgcaaggtgcgtgacatcatcctgatggtgggcgacgtgtccgacatctatgtaaccaacttcggcaagatgatgaacgatgaaaacttctcaccgcgcgaactggacgccatcgccttcggttacacccgcctgctggaagagagcaacggcgtgttgcaggatctgaaacaggttatcaatgtcagtaccctgtccatgaccgacaaggaccgtatggacgtggtggacaactgctattacgagatgcgccgttaccgcaaccttgtgagctattatacgaacaagaacatagccgtaagctacctcagggccagaaagaagaacgacctggaacgtgtgatgcggctctatgggaatgaaacctccaaatactggtagccatgatgccgttgtcgatagattttgccaacctgcacaccatactggcaaccctgtatgacgagatgcttcccctttgcgaggacatgatggacgtgggcaagggacttgccggactgggtgcgttgttctacgttgccgtccgtgtatggcagtcgatggcacgtgccgaaccgatagatgtttatcccctgctgcgtccctttgccataggcatctgcatcctgctctttcccacgctggtgctcggcacgctgaacaatattctcagtcccatcgtgcagggcacacacaagatgctcgaaggacagacgatggatatggaacagtaccggatccaaaaggaggaactggaaaaggaggccatgctccgcaatcccgaaacagcatatctggtaagtgacgaggagtttgaccgtcagctggatgaactgggctggtcaaccatagataccgcctcccggctgggcatgtatgtggaagtcgggatgtataatctggaaaagaaaatccgggatgcattccgcagcctgctggagctgatattcgcagcggcatcgctgctgatagacaccgtgaggacttttttcctggtcgtactctcgatactgggaccggtagcgttcgccttcagtgtatgggacggattccagtccacgctcggacagtggttcacgagatatatttccgtttacctgtggcttccggtcagcgacctgttcagcaccctgcttgccaagcttcaggtactgatgcttcagaatgacattcaggaactgcagaacaatccggactactcgatagacaactcgaacagtgtctacatcatctttatgctgatcgggattatcggatacttcaccgtgcctacggtagcaggctggatagtgcaggcaggcggtgccggaaacttcagccgtaacctgaaccgtacagccaccaagacaggggggcttgcagccggagcaggcggtgccgtattggggaatatcggaggcaggctgaggggcaaataaaccctgcggagcctccttcccatgagtcgggcaacccaagatgacgggtccggtgacttgtcggaacgggatgtcccgtcataccggaaatatttattcattcaaaccagacatcaaaaaaatggaattcaagtcattgacaaacattgagagcagcttcaagcgcatccgcctgctgctggcggtctttgcctgctgctgtgcgctcgttaccggatatgcgctgtggagctcataccgctttgccgagaagcaacgcgagaaaatctatgtgcttgacgggggcaaatcgctgatgatggccctttcgcaggacctctcacagaacaggcctgccgaggcgcgggaacatgtaaggcgctttcacgaactgtttttctcgctctcaccccagaaggatgccatcgagcacaatatcaaccgtgccctgcaactggcagacaagagtgcctatcactactatgtggattttgccgaaagagggtattacaaccgcctgatttcaggcaacatcaaccaggtggtgcatgtggacagcgtggtgtgcgactttgccgcctacccttacaaggtgcggacatacgcccggcagctgattatccgtgaaagcaacgtgaccgagcgcagcctcgtaacttcctgctcgcttcaaaacacaggacgttcggatgacaatcccaacggattcattatcgagcagtttaccgtgctggagaataaggacataagaagtgcggaacgatgaggggaaaacgcggattcttcggccatgcggacagccgggtacggctgttctgccggcggctgacaggaaagcagcgcatccttctggcaggcacggtctcgttcctgcttgctgcctcctgtctgtactcgattctctcctgtgtatcccgtttcggggagccgggccaaagaccggcaatgggacatatccgttccgtcgtgttccggtcggaaagaacaagaaacattcattcaaacatccataaacatgaaaatggactttcagaaaatcagggaacggctcggagtgtcaaatgacaagccgctgactcccgaagagaagcgccggcgcgcaaagtatattgtctatccgtttctctgcctgctgtgcatggggttcctcctgctggtattcagtccgtcggaaaaggagaaggcggaaatggaaaaaggcaagggtttcaacgtggagatgccttcaccggaagattcggaaatggagggcaacaaggtaagcgcctatgagcaggaagcactggcaaaaaaggaaaaatggcgcaggggaaccttccaggagatgtccgaactgctcaacaagggcggtcaggatactgccggtcttactgcaggaaaagcaaacatggaacttccgccggaaccggaaaaggggaaagcccccggctccatccgttcctctgcagaagcctaccggaatatgaaccgttcgctgggcactgtatatacccggaatgaaaatcagccagatgccgatctgctccgccgtattgaggatctggaaaaagaaaggaagccggcggaagaacaggcggaaggccagaccctggaagaaaagatggctctgctggaaaagtcctacgagctggctgcccgctacaacgggaaagagcctgatgcttcctctacggccaatgccccaaacagccggaaagaacggacggctgtccggcctgtaaaacgggtacagaaccggatggtgtcatcactcgcccagcctgcaggcaatgaagacattgcttccggatatgcaggcgagagaaataccggcttccacaccccggtaggcaaaatgccatcttccggcaggaacaccatcgccgcctgtgtgcatggcacgcagaccgtatctgacggacaggcactgcgtatccgcctgcttgagccgatggcagtggacgatctccttatccccaaaggtacggtactggtcggcggtacacgtgtcgagggggaacggatgggaatcctgatcgagacagtggagtacaggggcacgctgtttccggtggaactcgaagtgtatgacgctgacgggcagcagggaatccttgtaccgaactcgatggagtatgatgccgcacgtgagattgccgccggcatgggcacctctataggaagcagcatcaatatctcaacggatgccggagcgcagattgcctcggatgtgggcaagggggtgatacagggtatgtcacaatatgtgggcaagaagatgcgcacggtgaaaatcaccctgaaggccggacaccggctgttgctgcattctcctgaaaaatgaaggaggaaaggaaatcaaccatttattcaccaatcaaccaagaaacacacatgaagaagattctgatgatgcttgccctgattgcgggcacagtggctgcatacgcgcagcagagcagcggggattattatgaaggactgagccgcaagatcggattcagccggatgattcccccacacggtctggaaatcacatatgacaagaccgtacatattatttttccctctcccgtgagatatgtggacctgggttcgcccaatctgatagcgggcaaggcggacggtgcggaaaatgtgatccgtgtgaaggcaacccggaaacatttccggagtgagacaaacatgagcgtaattaccgaagacggcaacttctatacattcaacgtcaagtatgccgacgagcctttgctgctgaatgtggaaatgtgcgacttcatccatgacggagaggccgtgaaccgtccgaacaatgcgatggaaatctacttgcaggaactcgccggggagtctccccgtctggtacggctgatcatgaaatccgtgtatgaacagaacaaacgcaaggtcaagcacatcggctgcaaacggttcggagtgcaatatctgcttaaaggactttatgcgcacggcgaactgatctatttccataccgaagtgaagaacgccacgaacgtgcctttcgacgtggacttcgtgaccttcaagatcgtggacaagaaaatcatgaaacgtaccgccatgcaggaacaggtcatctatccgcttcgtgccttcaactatgtgacccgtgtggacgggaagaagaacgagcggacggtgtttgccctgcccaagttcaccattcccgacgacaagaagctgatagtggaaatgtatgagaagcaaggcggccggcatcagtcctttgatgtagagaatgaggacctggtacgcgcagaaaccgtcaatgaactgaaagtcagatgaacgccatgaaaagaaactccctctttattaccctcctgcttgccctctttacggggcaggcagaagcccaacgccgcctgccgggaatgaaagccgtccgcttcaccactgaaatggccgacggattttacagccgggcaaaccgtcacgatgcaggctatgccttctcgctggctgtatccacctgtaccgggaacagaaaccagtggatgtttggcggtgagatgctgaaacgtaacatcccttaccggagtacgcatatacccttgtcgcaatatacgggggaaggcggttattaccatacgttcttttccacccccggcaagtccttcttcctgaacctcggcgcttccgccctgttgggctatgagaccgtgaacgaaggagaccggctgctggatgacggagccgttttgcagcaatgcgagtctttcatctatggcggcgcggtaacgctggaagcggaaggatacctgtccgacagggttgtcctgctggtgcgtctgcgtgagcgtttcgtgtggggcagcgcctcgggaatctgccacttccagtatggaatcggagtaaaatacattttctaaccttaaaagaatacatacccatgaaaagaaaaatccttgattttatgctgacagcctgctgtatggcattctcctttcttggtcttgtcgcttgtgacaatgagctggatatcaaacaggaatacccgtttgcggtagaagccatgccggtagcggatgagattaccgatggggagactgtggaaatccggctggaaatcaagccggaagggaactttaccggaaccgtctatacgctaaggtatttccagccggatggtaagggcagtctgaagatggaggacggaacggtactgaagcccaatgaccgttatctgctgaacgaatggaaattccgtctttactatacttcgcaaagcggcaaggaatcccagaccatagacctctatcttgaagataattgggggaatctgcaacaattgacatatgattttaatggaaaggatacggatgaagaaaataacaaggaggctgcatgaaaagaataccggctgttatgatctttctgttacttgtcttgtacggcaaggcggaaaatcccccgtctgacaaagataaggcggtagcctgcatcaagcggtgggaaggctggcaccgggggaaaatgccttacatcggttacggacaccgcctgcttccccacgagacgctgaccgagaacctgagtgaggcacaggcggactcacttttgagatgcgaccttgaacggtgtttgaaggtattccgaaaatatgggaaagattcgctccttttaagtctgttaggctttaatgtaggctgttaccgtctgatcggcaacggcaagatacctaaaagcaaactgattcagaaactggacagcggcaaccgggatatttacaaggaatatgtatcgttccgctgttatcgggggaaagtcattccaagcatagagagaagaagaaaagaggagtttgaactgttctatataccgtagattgcttgttgataaaggtttggttgttacgagacgaccgaatcttttttatttgtccggtatgaacatatccctaacaggtgttgtattttaatgtaaccgaaagacataaaatgtgttattgagcatatggtgcataaaaaatgctctttgaacattgtctttcttgattttttgctaagtttgagatgtaatgtcaaatgcataaaacaagtcgtcatgaattcagaaataatattggaaataaatggctacaaatgcaatctactaaagtataaatactgtttttcccgtaatatagaccgtaaaggaagacctgtaacaggaatgttaggaggaaacatatatatagaaatggaatctaatggcagcaattgtattttggatatgatgcttgttgatacggatcggcagcgttccgctttcttttctcatgcagaaccttttccggtttgggggaagatactgcatagcatagacgatatgatgtttcgtgaacttttacttcgtatcgttatatcattgaaaagtttacggatacaaaaaacgcctaagctatcacctaattgtggcaatttgcgatgaaacctttctgaaagtaagtgtaaccgcaaagaatgcttttcttcgtctttatactcgaattgcttttcaaacataatctgattgttctgttctcctttgacaatgatagtggcttccttaccattgtgggcttgtacttcaattgaaattattgttctgttcatacttacaaattttctttattctatatataaaactttgggaaagatatatgagtgacattttgtcagaatagagatataggcatacctcttgtacatataaaagtgtcccctaatattcgtagtatcaggaggaaaaggattcgtttaacactgtaaaattgaacaaaatatggtataaatattggattgaatttaccccatagggaataagacaaaagcttatttggttagagaagtgattggtaataaacttgctcttaccgcacccgattatactcgtttatacttgggtatgtctgaagttgaaaagataacggactgtaatgtgttatttaaactgggaaaaatagatttttaaatattggaatatgaaagaagaaagatttattgaagaagattttgaaggttttctggaggacttgataaagtctggtcgtttagatgacaaagaagctggtatagctaaaaggatgttggacaaaggatatgacaatttatctgataaacaaaagtatgtctttaataagatgattaggaataacagcgttgaggaatgtcaaagatgtgcttgtgatattccttggtctgaaatgcttgaagctcttgataatggcggttattgtaactactgtcagcatatgatggagaaactggaaaacgagtaagaaaataacgggaatagctatcaaggttattcccgttaatgtttaatcagttattataaatcagacaagcctatttagggtattgtcgtaaatactcacctcatataaataataaataaggacatttttcccaaccatattatgattatatgaacgaaaaccataaagacacattacatattgaaagtattcagcaactaaaaaaacaagaatcctgatttagttgatgcttttctggaaggagatagtcttttatttagagtgcactataatcaaaatttaattccatatacttaccctgttcaagttaaataacgagcaaatagctgcttggataaaatgacttgaatagtcaaattagatacatttacaaagcgggcagagtcataaaatgggaaagggctaaaaacagaaacgccacaggtatgatgtgatatacatcaccttgtgacgtttctgtttttttaagatgtatttgtctgctattcttacttttgaagcaagtattcccctattgaaagataccggtctttgattgtggcattttcattgaatccattcagacaatggagcaaggctttctccaaagtggtgtatctgcggttaaaacattgcggattgtccaggcaataggcattcaaggcatatctgtatggggcatattcaggattatcctcttttgtgattttcacatgccaaggaaagtgtatccgcagagtgaatgaccgtgtttccccttttgtaatccgttcctcttcctccagcatttttttcacgagggacctgtccagcaacggatatccatattccctgtaatgtttgatatggcagcaatactccgttgcgtattgcttcaattcttccggtcttataccatagtgcttcccatagaaaagcagcacttccctgcctgttacgataacgggctttccgtccgcttcatgtttaaatacctgccgttccatcttttccctgtctgtcagcaaggcaaaaccgaaacattccgtaagggtgaaactttccctgccgggaacggacagcccaataaggctttccaatgtgtggcagtaaaagaaaataccgtcatcggccataccggtgtccggtgaaagcataattcttacatccttgacctgaccgctgtccctttggacaatccggcaatttgcgtaatgtggctcacaagcattctctttcttgaacctgtggtatttctccaaaatttcgttccggatttcctccttgtcggtcagggcaactcccaatccgcagttttcgcaccacccgtaataaaaagcttcgtccgtgaagtggtcgaactcttttgtgttggggtttaccattgcctcacacctgacattggccgatccgcatctgctgcacactatattattttccattgttcttctgctttacgggcgactcacggccgcccttgtcatacaattcggttgttattctcttaatttatctttacccggttcatcagctgtcccgaaatttcatgcagttcccggcagcgttctggctgctgttcccttgcaaaggcggtgattccctgtgtcagtttccatagcgtggccccgcctgtaactccgtcgtcaggattgttgttcatcagcagtttctcgacctcacgtccctcgtttttcaacaaggctcctttctgcaccagattcttcagttccttgtcgaaatccacgtctatctccgatgctccttgaatttcgatggccttctgcatgatggtgtctttgctgtacagtcctttggtcaggtcggaaacagccgatacggtggtctgcgtgtccagttcgtaggtcttttgggagagggacagggattccggcagtcggcctccaaggtgtatctgccgcatgacggactccctgaccatcccgttcaggcacgccccgttgagcaggaacgaccgcatatcgaccgatccgttgccatagtcggatgtggagaagcgtgctcctgcgaagatgatgaccgttccgttcttacgggtgggtatctctatcggagtgggcaggattgtttcacaccatactttcgtgtcgttcatataggcatcggacacgaccgctccctgtcctcccgcctcacggatgaaagcggtcagtatatccaccgagttcagccgacggtaggagtccgacaatacgccccggacttccattcctaccgcccgtatcagtacccgtgtacgctcggtccatcccgaatgctcgttcaggatggtggcgcacaactgtttctgccaaacatccccggcggaaagctcgcgcaggtatttggcgggaatgcccatcttctccgaaatctggcttatggcgttgccgtgcaggttgaagttcccttcgggcattgccatctgtacccttccttccgctttgaaagagataacggggcgttccttgctacgttggcttaccccgatgggagcgatgaaatcctgcgcgatccgtccctcactgagcagacggttaatggtgtccatgacaccaccttgcctgccttctatcatccgctgtaccttgttaatgactacctggttgaggccctgctgcttctgtaccgatgcagctgccggcattactgttgtttccataatactatgtttttaatgttgatgaatcagaatttattcttagagcttgtcttggttgttttagcatgtcccatgtatttttcttctgacaaacggatataatcctcttcgctatatccggtcagcccgaacagttcataatatccggggaaagtttttttccccgcttccggtatatgcatgctggttcccttgtggcagcagatgatatgccggacaaagcggtaacacttgcaaagatcagccacgacggtatattcgttgtccgtatgaggttcgtaatatccacaggaaagattgatacaggatacttccagaccgttccttttcaaagccgccacatctgtattcagtccctgtgccggcttgtagccgtacttccggacatctatagctgaaatgaactcgttggagcagagcttcatcccattgatttgtgttaccatatccccgttccctttccggtcacactgaatcacgaaacggcaatcggaaaagaaggacatatcggcatggctgctgcctatgcatcccacctcctcctgtacgaagaaggcacatttcaccgtcttgcaatcctccaggcatttcaggcagatccagatgccgttcttgtcatccgcaccgattccggtcatccgtttacgcttgtgatcatagccgacaatcatcgagtccgccacaagatgggctgcataagagcctgtcttgcgccggtgtacctcatccatgtgcgccacgacacaggggtagctttcccggttgcctttgaccgcatagatgtttccgtacctgtcttgccggaaaggaatctccatccttttgagttcctctatgatgaatttagccatcttcccctctctgccagagggggaagaaatgccgtaaagagccattagtttttccatgataatgatattttaggaaatgaacaatttttcgatttgcaggtatcgtctgaattccggtacgggacgccctttacgaaagagaaaagacggatatttctttcctttatattccactgataatcctttcaggactttcccgaatacggtagatacatagtacatatcctgacagttcttgcagaatgccgcatccgggaagatatgtatcttcccgcatttgggacatacatattttttcctgtttgcacacccttccgtgctccggcaggtggctatgctcgtgtcgccctccgtatttctcagttccaggttaccgtccgtcagatgaaggctgtagaacgtgtcgaggtaaggcacccctttcttgtgccacctgcaggcgggcactttcaccgtcaaagagacctgtatattatctccggccgcccattcctgcccctcaatgggattcagtacggtgaaatccgtcgtatgtgtataatcgttgtatctgcgtcgcaacaggatgcctgcctcctgcgcctgcttgcggatcagttcgacgacgaatgcgtgtgaggaatagatacgatccagcagggaggcggcaatcggtgtgtttattgatttccacaatgttatctcgttccatacaatggcccgtccgaccacattgctgctgtcatcccttgccacgagtattttggctcctgcgaaattggcatagaaatccgctgcattacgggccttgtcttcatatctcatacaggagttgtgcaggctggattcgctaccgtcagatatgggactatagttgctttccagataagcctccataaaatcgttcatactgtcatgcagtctgattgtgaccttgctgtccagtgagatggcgctgcagaaatagttgatttcatcgggctggtacggtcccagatttttgaacagctcgataaacgtggacggttccagatctgtccggttctccggaaaccagggtgcctgcggattgttccggtccgggaaattgggatggcccaagtctttgttgcatgccgtgaacacgatccggattttcttgaacgtgccggcttccgtccgtttgcgtttggtggagaaaaaattgtaggacccccgtatgacttcttccaccggtacattcttttttacttccgaaaggatatctttggctatcacacttccgttttccgccgcatgggtcaggcgggatttcaattcgttgctaacattcagtttcataatcattcggtttattgtttataaattctgttgtttatatggcaattgtttcttgccaggctgcatttggcgcaatttctctttccgctttctgagcaggtcaacggacatgttcctgcttgtccgatattcctcctcactcatccggcgaatggagggaatgcccgtccgggtcagcgtatggtttaccatccagccgtccatgaagttttcggggcagaggctgtcatggtggatgacctcacctatgcagccatgtacgagcatgttgcaaacggtcatcaggcaacaggtacggctgacatcctctgcaaccagataattacccaggtggcgtacatgatatgccagcagcagccttccgcttccgcatgtcgggtcacagatacgttttcctgtcgctgtctcccccgaatcggtacataagaccatcaggtcgcagatatccggcggagtgaagaactgtccgttcacctgccgaccgcttttggaggatattgccatgaagaggtcaccgaacgcatcaaaccatccgccggattgcaattcccgctgcatgagccgtatccatccggtaagcatttccataaaatgcctgttctgctgccgtttgtatttccagtccataaggggcggtgcgccgggagagaacccgtgaatgacatagcgcaggaaatcgttgaaaacggatatcggatcgtagccgttcgaataggcgaaatcacagaccattttctcaagcggacgtatcgcctgcggtgtgttgtatggtaccatattactctgattttttatagattgttactatatgtcttttatggtcagtctgtatcctgacgggagaaatgccaaggaaagagagatgggtgtccgctttcagcatgttccattcccatgcgggaagttccttccattccatacggtatgcccagagtatgaacagaccgggacggaatccgttgaaaagctttccgtgcagaatcccgaccagccgttccagttcttcccgcgagtaaagggtgaatgcctcattccgatagacaaaggcatcagccggttcaatatccggctgacactcgatgaggtatctcttccattcttttgtggtgtactttccgtacagaggatcgggttccgtgtatttccatgccctgacgaatgtgtggaagaggacggcaccgttcctgtgccttccggtatgcccccacatccggaactgtttgctgcgtatgccatcgggaatcagcaattccggaccggttgtaacccaagggcctccttcggtattgtaaccggtacacttttcattttcatggcaaaaaggtgtctgtgggagaaggcagatatgaacttcccggtcatcgcccctttcaatgtgtgcctgcggataatagtcaccgccacgggtgatataagtgacaacgtctcctgcagtcggtaaaccggctctttccctgtcctcccgcatccttgaaatcagccggttcaccttctccacatcacattcctttatggagcaggcacacccttcatgcctgttgagcagagtcagactttccaggtcataaaaattaccgtacttcatattgagatcgtttttgttgatacaatttgacctgacgggcaaccatgtcgcagaacttctgtccgttctccttctcgcttctgaaataggcaatcatgtcccagagattccgattgaagtagccggtccatttttcgtaatagtgacctccatagacctttccgaacgtttcctcgaaaagtgcaggagtcagcccttcatccccgtggtggttgtattgccacagggagacaagcagcagctggttataatccagtgtttccatatctgttcttttttaagtaaaacatcggcctacatgggtaggcatttttatttcttgatgtctttcctgtctgttttccggggattgcggcaaggcttggcgaaagaaaataccgcagcgaagcgaggatgattttctttcagccaacccagcccctgaaaggggccgccttgcacaatcagcccggaaaacggctatctttacagcaagaaatgaaaaagcagacctcggattctctgttctgaagtctgcttttcggtcattgtcaagtttcatgtttttcaggtatgtatctgccatccgtggaacggctgcaatgttacggcaaacgacctgtcaggtattccatgatagagcagacctcccacgatacctgtccttccgtcgggatagtgctgtgtgaagccgaacgagtacggggcatggtcatagtagagtgagatttcgcagggataatcaggattcccttcccaactcttcaaccgttccaagcacttttgaagtgaggtgtcaccgatggattcggcatagcgctttacgttctcgaaatgttcttcattcaggattttcataacttttgtatttttatcagttaaacacgtccggctccgggagccggtatttttatttctcgcctgcctgacagtcccgtggccgtacccgcaaggtttggcgaaagaaaataccgcagcgaagcgaggatgattttctttcagccaaccccgcaggggcctgaccttgtacgggtacacaggacacgggactacctttgcagggtgggaaataaaatatacggttgttttttgttgtgggattttgtgtggattccttagataatcttcctgatttgttcgccattgccggacaaatgctgtatttttgcaatttctaatttcaggattatggaaaactatgtaaagaaagcggcggatgctttccttgtggagcgtccgtacggtatgcgtgtggattacaggaagaaaggattcgtgctgtttaaccgtaacctcaatgtgttgggaaatgcggaacagacccgtctggaagaactacctctggagcggttcaatgtggaggagattccgttggagggtgaagtcgtggaggaacacgcgggatttaccgatgtattcttctataccgatctgaccaatccctatgccggatatgtactgaatttgcaaaagcttaaagcctataaccggttgatgtttccgctggcaatggcgctgaaccgtgaattgtgaggccggaagccggtagcggtaacagctgcatggagcagaccgttaccgccccggatttaattatttgccctctttttctgttatgaacgccagatagacggacacggccttatggcatccggtaaagtccggagtccggcagcccttgattttccggaaactgacggttccgttcctgtcaatgcccctcacatgcctgttgaatgtccctttggttctgatatggatgtcaaaaccgtcccttccggtgatttcaaggaacatttctcccgtgatccgttccccgtccaggaatttctgtttctgttcattgagcagccgctgatgttgctcttcctgcactttgcgctcttccgcctctttctccttctgctccctgcgtttctgctcctgtattcttttatattcctcacgggcttgcaccaagggggtggtgtcaagtccgagagcttcgaacacgcggacggagatcaaattgacgaaggctcctctttccgcactttgaagcgtatccgcaatccagttcctgcaataggtggcggcttcctctctgcaaccttctcccttgaggaaccggcgtgaatactgcccgctagagaaataaacgttttcaatccggcagaccacatggaaacagtcatcgtcttcattcccgtattcgttctttctcgacagggagagatatacattctccgcgtacggctccagttccatataaggagccacgacggtattcccatcagacttgtacttgaatacttttgctttcatactatcgttcagtttgtcggttgttgcatatttcatctataatctctttcccgcttctttcacccttcaggaaggcaaggaagcgcctcaaaaagagccgggcacagtcagttcccagctggaagctttcaccgtctttggtagcacatacagcaaaacgccccagtccgaaactgtcctgttgtggtacgatgtggtaagacaagtcctcgcttgcgttgatgtgcaacccacgacggaaaacatagaaagttttcgggattcttctgtcggtatcgatttccatacgcttgtaaccgtgatgttccaataatcggcccagttccctgtttgtcggaattgtatgtccgatccagtccggccagcttatattttctattgtgtgtccgtaattgtcatataatatgttgaactgttcctggtattcatcgtaaaattccccgttcccgttgcacatttcctccaacgcgatgccgtttttacggacaagggcaaggtcgcccagtccgcacgcgatttcattgagcagcgtgcgttcctcatccctgttctttgccgttccgtaaattctaagccgggaatatcggtgtagcgccgaacgggacggcatatccagtttttcccatattccatcgtttcctatagcctgtctggtgtttcccggaagtccgtaccaccacttgtccaaattgtttgtatccataatttctgaatcagattgttttcaaattctgttttgagtaccatgcctgatacgcggcggcatactcctgacgttcccgttccagggaatttctcatttcaggggtgtacccgagcaggcggatgtatcctccgttatagccggtgggttcgcactttattccggcttcctccagtttgtcgatgcgtttttgggccatttttgcgcttgaatattccttcggccaaaaatagacttcgccccgtgagccgaaacagtcttcccccagaattatttccccggcatacttccggctttcgatgatgccgaaacgcgctttgcccaatgcctggcgcattgccttgtgtgccggaccttccggatgcttgaatacctccggcttgtctttgctgccgagtttgggcggttccaccttgtacggctgtttgtaacttccgattccgagcgtcaggtaaaagttggtatgaaaatagtccgtcatgggggcgctgtcatcgaaattgtacgacatgacgaaatcgcagatattcatcattacatcctttgccctgtccgtcaatgatttgtctgaatggatatgatggtggttgacatcgccttgaacttttccggactctttggtgaacgcctcgaaatccgctttcatcaaccggatatggatggagtggtaattctcccgtctggcagagaacttgtatcccggataggtctccttgagccatgcccgtaccagtcccacgatttccggagcgtgctgccccttgtaattgcggcctttccagcggtattcgttatacacatacccggtgtattcctttgccgtggctcccggatagtcatattcatatccggttgaggtcgagggaatatccggtttttctttccaagcctcaaaaagccttccaaactcggtggtcacctgttgcatgattgcggtgtcaccacccttgtccgggtggtgctccaatgccagccggcggtattctttcttcaagtccgccagagagtgtatgttctgaaaataagtcatagccataagttttttatgcccctgcgaggcggttgataaaatattcccggtagtcaagctcaaaaccgaggttgagacaggccgtttccatgtcatcttctctcaggtcgtccgcctcctgcaattcgcgcaggtaccgtatttcggagtccaggtattcctgtgcttccgtttgaccgcaaccgcatgagttgcagatcagactgataatgtttccctgcatgctgtttgattttttatgtttctgttcctgtttctgaggcctcgtccgtcatatatcgagacggcccgttccaccagaatcctgcggttgtcttccgagagttccaggtagaaccgttccgccgcgccgaatgtgcccttgtctgtcgccacgcaccatttttcccagaaatgcgggtacatgccgccatacacggctttgcattcctcctcgctccaggcgttccacatgtagtagaagaaactggagacggtattttccgcttgatatttcatggttcttctatttgtgattctacattgtttgtttctctcagttgatgccacacagcctcatacatctcatgaagccagtctatgttctttgcgccgagttcaaacgggctgtgacactgcacctcgtcaccgctttctttctcttcggcaaggacggtcaggctgtccgccgttacccggagtcctgtcaccctgcattcatatggttctccgttcttgccaaaccatatcacccagaccggatcataatcctcttccggaagacgaatttctttcatgcagtgagcatggagcaactgccgtatcgcgtcgatgatgtccccccgcagttccttgatcctgccgctgaaatcaacggcttctgacggtaaacttccttttccgcctctttcctgcaaggagagaatccgcgtgtcgggatggatacagaaatcccactccaacacttcatcgtcatcgcgtgtcgtgtggatatcgccgcccaaaacaagaccgcaatcgtcatttaccattctttttgcttcatcgcggtcttctgccgctaccgtgtaagtgccctcgaaggaataccttactcttatgtcatatcttttcatgattctttccatttgattgttgataccagattcattgcccggaaggattaccggatattcaatattgcgctaaagacatgtgggtcaagcctgtaaaacgtcggaaggttaagtgtgaccatcgggtagcttacccagccgctctgacgtttatagcctgtatcctcagccaatttgttggacagaaggaactccatggcatcaggattgttgttgatgtccacgaatgccctgtcaggcagtgagaatgccgccttatcttccaggttaaccgtcaggaccgtgtatatctcatgggtcacgggatctttcagagacaatgccggccagccgttatggtatatttcaatcacgattgagagacggctttcctgatacaggaaagtctcttccatggacggatggtcgcatttgataatttcaaaatcatcctcccctttggtaaatgtcaccatcggataggatacatcgacaaaacattcctcttcccggtaacagagatgttcttttccctctgaacggattatagccaatcgggtgttcatattcgtaactggttttaaaattattgacttgcaagttaattggtcggaattcacctgcttgtttctttaaacgtgtgattgtcaccgcctgcggacatttgggagagttgctgtctcaccgccttgattttcccgatcagttcgtcctcccttcggaatgagggggtacatttggtacgcctcatcccggctccccaggggatgccgccgcatacttttctcaggcgtgccttttcgctttccaaggccgactccagacgggccaacctgcgtcgcaacgattcttcggtcacagttctcatgatctcattgtttttttagtatggtgacggatcggaaagacagtcaccataccgtcgttatgtgtcacgttatattttagctttttcccttttgatgcctctcaggacgtacaacaggtgtaggaacagctccctgtcgtaaatccggaagaagaacggctcgcctgtttccctgaccgttccggtaaacgacacggactcccggttcacgggatattggaagaagttgccgtttgccagcagggtgtgctttttcttcatcacttcgcctaggaacctgtccatatcgtcgtttccctcatagccggagaagtagaggaaatgatgacggcgcaggcttcgcaggattttggcggtttccagcctcacatccctgcctgacgattcgtccgttcctctcatcaggttgcagatgaactttttctcgccatttatgtcaagaaacagataaggaactataattatagaggcatgccgtgcgtggccggagatgaccatcggcttttctttctggatgtctcctttgaaggtaatgttccggtaatggttgtccatctgccgttccagctccttccttggcgtggtaacggagcggagtcccgtgaagtagcgtccgcccgcccggaaacagaaccggtagatgtccgcatgataaggctctcccaggaaaaagaaattccgggtatggcggatggggggcaagacatccatgtagtcgaaatatctttcttccgtaatctcactgaacggggcgcagagggattgcaggtggatgcgtatcattttgcggacggtatttccggacacggctgtgagacacgggttcttttccctgtctctcagttcctccagtgtctcatggtggtagtcgccgtgtattccgtcagacatggtggtcacgcagctgccgtcaaaactgcgtgaatcgactacgaatttcagtttgtcgttattcatggttcagatgttttgaaggttcaacactcttttggcggcactgagggcattggaggtgagctgccgttgccatgccttgtttttgggtgaccagcggaatccggaggatttcagttcctttcgtctgctgtcttcaggaatcctgtcaaacaggatctgaaggcggtcttccccatagttccatacaagtgtcccgccctcgaacggcacttccttgttttcccggctttgcatcgctttcagcttttcgcgcatccgttccgccagttccggcaattggaagaatttgtttctcggtgtgatgacgggtttcttcacccttgcgttatattcggaaatgaagtccacggccctacggacgatttccacttccccgtgattggccaaagtggataccttgttcaggatgctgctgacaaacagggcacggctatagccccggcattgtccggtatcaatcccgtggatggtatcggcactgctcttgatgtcgcgtttgagcgtctgccatgccttttcctgtttctcttcctccggtcgtgcggcttcctttttccgtctgacggtttcaagaacttttttccgccaattgcggaattcttcgtaacggttctgatagcttctgttcgttttttcctgcctgtagtaatcaaatccgctccgtcccgtcaccatcgggttggcacagcgggagaggaccgagagctgggcggacaacttctgccggtaggcggcgatgtatgtatcccgttcctcttccggcatgagttgcaggtcgttgtgcagcccctctccgtaaatcatgatgtccgtctcgccgcgaatctccggattgaaggaactccaggcgtatgcgtcgcaagcctgtttccacatatcatccaaataggcaggatgtttgaatgctacggcttcccagtctttgaagtccttggaatgcaattcattgtgatcttccggatttccgtacaggtgtacatagttgcccgttccatgatgctcctttctgaaatggaacggtacggggggatagtccgtaccttttttccggatcatcgtgaccctgtgtgcattctctatggtaaggtctgctacttgctcttcgcagacctttgctgttgtttcattcataatcattacttttttaaatgtcagccgtaaatcatttcttccagttcatcgtccgtcaacaggcggatctcttcgtccgaacaatagtaagcgatttcttcgtccaaatcgaatgctgtcggatcaaggcttctgatgccatccagcagttcctgttccagtctttctacggaaaccagatagttcccatctttgccttgcacttcccgtgcaggatagctcatttcccgataaaccaacatcgtcatttccggattggcttcctgctgtcctttgcttgtcgtctttctgttcatacctttatttttttaagtttgacatgatcggctccatggagccggattttcgttttcttacttgcctggctgtcttttgtcggggattgagcaaggcttggcaaaagaaaataccgcagcgaagcgaggatgattttcttttagccaaccagcccctgaaaggggccgccttgcgcaatcaacccgacaaatggctatatttgcaggtaagaaattgaaaggacggcaggatattgtgaattatagattacaaaaaaagccatccctagggggacggcttaatgactgaatttgtatacttattgtgcaagacgctccttcacgttgttcattgcttctttcaggctgctgttcatgacccgtgcataatgctgtgtcatacgtgtggaggcatggccgagcatgacggaaacatcttgaagaggcacattgttggcaagcgtgaccgtagtcccgaaagtgtgacgggcaacgtgcgtggtcagattcttcttaatgccgcagaaatcggctatttccttgagatagctgttcatcttctggttgcacatgacgggcaaacagcatcctttcttaatgcaggtcggatgttccttgtatttctccaatatggccaggggtacgggcagcaatggaatattgctgatggaagaagccttcctacggtgttccaatttgacccttccttttcttatccaccagtctccgagattgtcctgtaccagattctctttgttcagactggcaacatcggagaatgccagaccggtgaaacacgcgaagacaaagacatccctgaccagttcaagccgtggaatggtgaatttctttttcattacggtctgcaactcgtcataggtcaggaataccggatcggtctcgtcctgctccatcttgtaaccgtaaaagggattcttgcgcatccattcctttgccaatgccatattggtaaatttcttgaagcatttcatataacggactatcgtgttccggcacagtcccgcctccgttttcaggtagatgtcaaacgcacggatgaactccggtgtcagctcatggaaagtgacatcctcctttccgtaataagaggggatgagcagctgtaatttcttcaccacgttcttataccggttgatcgtgacgggagagtagtctatacccgccagtatttccatttccttgatgccttccctcatggtgccgagcagtgtacgcatttcggtgtctttcccgaaaacacgtttaagaatcagttttggggtaatcagggcctgttccaataccagttccttgtgtttttccaaggcgcgtgcgtgcagttcggcaatataggcgttcagtgccactgatgccctgtccctgcctttactgcatcctttggcggcgttccataagttcaggggtacgcttctttggatacgtacatcgtcatagtctccattgatggttatccgcatcaataccggtgcctcaccgtttttcaacaatttcgttttaagcacgaaaaacagaatgttcattgttccttgtttcatcacttttgttttttgaggtgttacattcaattgtttcgtcaaaaccggatggcatgaggacgtggagcgaaatgttaaattcggtggtttttttgagggacttgtggaaaagccataaaaatcccatttttctcaggttcgaattgccttttgtatcccgggttcgattccttttttttatcccgatgggaaataccgaatttttaaatttctttcactttttcgacttcatccggtcatgtgtgcaaaattactttttcacaccggagattggaattgtcaaacagctgaaaaacaatgaagtatggtgcgtatttatggctttttcaaaagccttaaaaaaagccactgaattggcgaaatccaacttcacaaatatgtagcggaatgcgtagtgagggtaaaaaaagaacccttgaactatctctaattcaagggttttcatgtgtgaaaagcatttatgtactttctttggtggtgccaccaggaatcgaaccggggacacaaggattttcagtcctttgctctaccaactgagctatggcaccttgcttgattgcggttgcaaaggtagtgaaacttttggaatctgcaaggcttccggtaataaaaaacactgataaaaagttagtctgcttattatcagtgttatatgaattgaaaatatttttgctgttaaccggaatattctatttatcctcctttagcggattccaaccttgggctttcagttcgaactcttgtccgtcacgggttatcaaggcacagccaagttctggtttggtgatatgtccgatgaggcggataccctccatttgcgaaactttttcgtggtcggcgataggtacggtgaaaagaagctcgtagtcttcgcctccgttcatggcacaagttgttaggttcatgttaaactcttcggccatgacagcagtctggtaatcaatggggatgtgctcctcgtatacgcgacagccggtattactctgtttgcagatatgcattaattcggatgataagccatcggagatgtccatcattgaagtcgggatgatattggcggcagcaagtttctcaatgatatctttacgggcttccggcttaagttggcgttccagtagatactccttgccggagaaatccggttggacatctttttcgcctttcagtacaaccttttcacgttcaagaagttgtagccccatataggcggcacctagatccccgctgacacaaatcaggtcggtttctttggctccattgcggtagaccactttatctttgtctgcgtcgccgatacaagtaatgctgatagcaagtcctgtaagggaagaagtcgtatcacctcctacgatatcaacattatattgttggcaggccagacggataccggcataaagatcatccatgtcctctacgctgaaccgtttggaaagggcgatagaaaccgtgatctgccggggagtaccgttcatggcataaatgtcggaaaagttgactacggcagctttgtatcccagatgtttcaaggggacataagtcaggtcgaaatgtacaccctccattagtaagtcggtagtcaccaatacttgcttctctgaagggtaagagaggacagcagcgtcgtcacctactccgtatttactggattcgttttctaatttaattccctcggtgaggcggtcaatcagaccgaactcaccaagagtagctatttcagttctcataaatcgattttaatgtttaggcacggttgataagttcacgcatgatagttgtcattttcggttgggcggcatcggctgctttctggacttcttcgtgcgttacttccacgatctttccctctactcctaaatctgtgataacagaaataccgaataccttaattccgcaatgattggcaacaatcacttcgggaacggtagacatacctacggcatcggcacctagaatatggaataatttatattcagccggagtttcgaaagtagggccttgtgtaccgatgtaaactccgtgctgaaccttgatgcctttttcttcggcaatttcgtccgccttgcggatcagttctttgctatatgcttcactcatatccggaaaacggggaccgtaagggatattctttccgcgtagcggatgttcggggaagtagttgatatggtcagtgataatcatcaggtcaccgatttcaaaatctgcattcgtcccgccactggcattggatacaaacaaggttttgatacccagttcacgcatcacacgtacggggaaagtaacctctttcattgaataaccctcataatagtgaaaacggccttgcattgccataatatccttattgcccaatttaccgaaaatcagcttgccgctatgaccttcgacggtagatatcgggaagttaggaatatccgaatactttatttcatacttctcggtgatttcgtttgccaaactgccaagacctgtgccaaggataatggctgtttcaggactggtgtgcatctttcctttcaggtaagctgcggtttcttgtattttctctaacatagtcaataatatgttggttaaatttatcttgttggttctgtaatatttctatttcaataggcagagcatagatgaacggttttaattccgcatccaagcccggatgattgatcaggcgtgtggcgtctttctcggtagtgataatcaaccgccgtttaccttttaacttgttgaatcgttcccttatctgttgcatatccttatgggtgaagtcatggtgatcgccgaatgaaagcaagtctatttgcttcgtacaatctcccagtctttcgaggataggggcaggagaggcaatacctgtgattaacaggatatcagtatcagtcagtaaagataacgcaatgccgccctcgttcgaaaatacgggttgcaagttaccataccggaacgacgagaagaatagccgctgatacggataaaggttcagccgtttcgtgataatgttataatcaatcggtttgatatcctgcggacatttagtgacaatgacaatctgcgcccggttctttccgctgacgggctcgcgtaaacgtccggccggaagtaaggtgtcatcgcagaaaagacggtgataatcagtcagcagaatgtttaatcccgcttttacgtgacggtgttggaaggcatcgtcgagcaggataacgtctgtcgaaggctctttcagtttgagtagcttttctattccgtggcaacgtttttcgtcaacagccagtgtgacggaagagaactttgtatacatctggtaaggttcatctccaattgtttttgccgtacattggggagtggcgagcacatagcctttagtacgtcgtttgtacccccggctgaggacggccacctgatatttatcatgaagtaactttatcagatattcagtgtgcggggttttgcctgtacctcctacggcaaggttgccgacacaaataacgggaacatcgaaactcttcgaccggaagattccccagtcaaagagcttgtttctcatcactaccactgctccgtatatccatgagacagggtatagccacttatgtatcttgataaagtgttcgtccatgcagtacaggttattttatattcagttcaaatgggacgcgtgcctgaatcatggatttttcttgcagattcttcaacagatcaaactgacggtagtattcgcccaatttgcttttcagcaattgtgcttctacgtaatttgtcggtttagtttcaaacagagaggagaaaaaatcctgtttcgccggataggagataacagtataattttcaatatccgctttggctacggcgatatccaatgctttgtcaatacctccaagctcgtccaccagacccagttccttggcggcttcaccggtccacacacgaccttcggcgatcttctcgatagcttctttagtcatgtggcgtccttcggcgcaacggccgataaatgtattgtatccttcggttatcgtcatttgcagcaatgctttttctccttcattgaaaggacgcatgatatttccgaaatccgaatatttatttgtttttactacatcgtaagtcaaaccgattttgtctgtcagcccttttacattcggtaccataccgaaaataccgatagaaccggtcaatgttgtcggttccgccacaatcgtatcagccgcacatgagatgtagtaaccacctgaagcggcataatcgctcatggagacaataaccggctttttagttttcagctcctttacggcgtgccagatttgttcggaagcaaaagcgcttccgcccggagagttaactcgaagcacgactgccttcacatcatcattgtctttcagtttgcgaaggtcgcggctcactttggaacctactataccttcatcagaagcagatgaaccggcataatcggtaatttctccggaagcataataaacagctacgatattgccactcttatccttcggtacatttttcctcacattgaccatatcgctcaagccaagcataggcaattgatcgtccttgcctatttctaccagctcttttagatagttacgcacatcatttcggtaaatcagcgtatcagccaatccgcattttacactttcctctgccggatagaacattagcatacggtcggcataggcattcaatgaatctaccgggatatagcgtgaattagatacaccttcagtcacttgtctccaaatagaattgatataagcagtcacttgttcccggttggcggggctcatctcggtagaaataaacggttccactgccgatttgtatgttcctaccttgaagatttgcatttctacaccaattttttgcagcaaatctttgtagaagacaggagcagcggcaatgccacgccactctatcatccctttaggattgagcagcactttgtcggctacgctggaaagataataaagtccctgggtgtaagagtctccataagcaatgataaactttccgctttccttgaaatcaagtagtgcattacggatctcctgtaaagaagcgtatgacgttcccaatgaagaggcctgcaagtaaattcctttaatattttcattctcttttgcttttttgatagaagagaggatatcgtccagaccgtatatattggaatcgtcactgaataattgtgatagaatgtccaatggattctcttgcgtgcgttcgaccaacgttccgttcagatcgagcatcattaccgaattcttttttactattgtctccgtatccgaagcagacatgataccgaacaaggtcaccatgctgacaataaataatacgatacttgacaggataataccggttactgttgcaagtgtaaatttcaagaaatctttcattatgcttattgtttttttgagccagcttattattaagctaacaaagataaataattgagttgtatttatccaataagtcgcaagattttttgttttatcacagtggaacgatagattgcctttggaaataaacgaatcgtacggatgtcatgagagggattttttttatctttgtcgctgtcattatgcgacattaatttaacattatatttactatgaaaagaagaatccctcttatggctgctgctttggcaggtttatttttctattcttcctgttctccgacagaaaaagcggaaacaaaagattatacccgatacgttaatacattcatcggtgcggccgataatgggcatacctttccgggggcttgttatcctttcggaatgatccagagcagccctgtgacgggtgcagtcggctggcgctattgttccgagtatacctatcaggattctctgatttggggattcacgcagacgcatctgaatggaacaggatgtatggacttgggtgatattctggtaatgcctgttaccggtacacgtacccgtgcctgggacgcttatcgcagtcatttcccgaaagataaagaagcggctgcgccgggttactatactgtggaactttccgatccgcaggtgaaagcggaactgacggcttctatccatgctgccctgcatcgatatacctacaacaaagcagactccgcttctctgctgatagatcttcagcatggtcctgcctggagggaagaacaatatcattcacacgtgaagagttgtgaggtgaattgggaagacgcccaaacgctgaccggacatgtcaataatgccgtatgggtgaatcaggattatttctttgtgataaaatttaatcgtcctgttgcagactcactttaccttccgatgggagagacggagaaagggaaacgcattgttgctactttcgacatacagccgggagacgagttgatgatgaaagtggccctttccactacgagcgtagccggagccaagaagaacttggaagcggaaattcctgcctggaactttgacggagtgagagacgctgcgcataatgaatggaatagttatctgagccgtatcgaaatagacggtaccgatgatgaaaagacaaacttctataccagtttctatcatgctttgattcaaccgaatgagatttcggatgtcgatggtatgtatcgtaacgctgccgactccgttgtgaaagcgggaacggggactttttattctacgttctctttgtgggatacttatcgtgccgctcatcctttctatacattgataattcccgaacgtgtcgacggttttgttaattcgttgatagaacaaggtgaagtgcagggattcctgcctatctgggcattatggggaaaggagaactactgtatgataggtaatcatggggtttctgtgattgccgaggcctatcgtaagggattccgtggctttgacgcggagcgtgctttcaatattataaagaagacgcagactgtttcacatccgttgaagtcaaactgggaagtatatacgaaatacggctatttcccgaccgacctgataaaagccgaatcggtgtcttccacattagagtcggtatatgacgattatgctgctgccgacatggcacgccgtatgggaaaagaagaagatgcggcgtactttgcaaaacgtgccgattattataagaacctctttgatactgaaacccagtttatgcgtccgcgcaaagcagatggaacatggaaggctccgtttaatccgagtgctttgggacattcggaaagtatagggggagattatacggagggaaatgcatggcaatatacctggcacgtgcaacatgacgtcccgggattaatccggctctttggtggtgaaaaacctttcctgaataaattggattctttgtttaccgttactttggaaggtgaaggtctggctgatgtaacaggattgatcggacaatatgctcacggcaacgaaccgagtcatcacgtaacttatttatatgcattagccggtcgtccggagcgtacacaagagttaatccgtgagattttcgatactcaataccgaaacaaacctgacggactttgcggaaatgacgattgtggtcagatgtctgcatggtatatgttgagtgcaatgggattttatccggtgaatccggtgagtggcgagtatgtattcggggcgccccagttgcctgaaatggtattgcatttggctggtggcaagacttttactattatcgcagagaacctgtcgaaagagcataagtatgtggatagcattactttgaatggtgaaccttatacgaagaatactatctctcatgaagatattgtcaagggaggaacattggtttataagatgaaataattctcaaagtattctcaccgtgatgagaaaaaattctcattatggtgagaactttttctcatagcaataagaatttattctcactgtggtgagaataatccctttatttctttagaaaatttgtaatttttcatataattgttttttattgaataacgatctcattaagtagaaaccagccttttttttcttgcttgtctttgattgccagtttaattcccggctgttggtcttttgtttggtcgatgatagctatagcccattgataagtacctttcggaatatccgtgaaagtaaccggataagtataagaatgcactgtgttatgcaaccagtccgaaggttctgcgttgtcgtctacccatgtttgcactagattcccttgtaggtcaaacaatgcaaaagccggtttatatttataattccagttgggtatattgttaggtagataaccatttcctgtatttttccattcgtgtgaaatgaggactgtcgatttggctttggcacggactggcaatgatacgctgcatggatatatccggtatcctccttggataataaacttttctaccaggtcatttgcccgttcggtccacccttttgtttcggggagctctcttaaatccaacgtattgaaatgtccttcaatggcgtgttggaaggtctgtttgtatacatctctccatgtattcatccgataacgtgtatccgaggtgaatggagtgcaatcatcggtggaacatccccagtaacaggattctccgacaagaagtgtctttccatacatatccgcgacgatcctcctttcttcatcactgaaccacatgcttcccaatccgtctcgtctcatgccatatccttttccgtcaattgcaattcgtttttcggtgtcgaaaccgatttggctgccgaaggggagcgtaagaagcacatttttgaagtgagtggaatagagggttgtgaaccagtcgaacacttgctcgaatttgttttggtcttgcaggatcacatggtgacattctccccaccaaccaagactatatccgtctacaaagtctacaatatccggattatcatattccttggcaaaggcttcgacaaacttttccagtttttcctgaaaaatcggatcatccggataaggtgtccaaagatcacctttcaatccttttacggtatatccttttgctccggcacggcgtacgtagtcaggagttccggtacgcaggttatcctgtccgttgttgtaaatacggaaacagagtttcaatccacggtctaaggcaccctgtatcagttttttgtaattttcatcatacagccaggcgtatttgccttcttccggttccatgtccgaccacctccaacgtacataaaagaaagaagcgtattgacgggctgcctcgtcttgggcagcccagtaaatattcgcgttttgtacttcatcattagcgtcatcatatactccccaacccatacaagggttgcgaagcaatgatacggtgtcttcctgcaactctaccttttgacaggcgtgtgagcagcttgtaaggatcacggagataagtgcaaatagatataaatgtatatgtttcatgctttatcggttcatttatttaattgtcatctcactgataaacgtccatccatccttcttctccttatctttgataccgatattgatacccggttggttatctttggtcttgtcgacaatagctaccgcccattggtaattgcctctggaaataccgtcgagggaaacctcgtaagtatagtttctccgttggttagacaaccattgcgaaggttcggcatcctcgtcaatccatgattttaccagtttgccgctctcgtcgaacaaggcaaaggccggtttgtacttatagttccaattcttcatgttattcggcaagtaaccatatccggtgtttctccatgagtgggagatagatacggtttggcctgctgaggcttcataaggcatgattacataagtaggatatactctgtatccgccgttcagaacaaatttgcggacaagttccggtgccagtcccgtccagccctttgtttcggtaatcgtccttaggtcgagtgtattgaaatgataagtctgggcatggtcgaaactctgattatatacatccttccatgatttgaaggaatattttgtgtcatttttgaaaggttcgtaagcagccgtatatcctccccagtaagcacattcgcccaccattaaaacttttccatacatctcgttcgctactttctcgtcattttcagtaaaccacatacttcccagaccgtctctgcgcaatccataccctttttggtcgatagcgatttctttttccgtattgaatccgatttcgctattataaggtaataccagaatgatattcttgaagttcttggaatacatcgttgtaaaccagtcgaaagtctctttcttcttgtcagaattcaggtacttgatatgtgagccttcgccccaccagcctaaagagtgcccgtcgataaaatctacgatatccgggttatcatactctttggcgaatgctgcgacaaacttttcatatttctgctgaaagatagggtcgtcggcataaggagtccatagtttggcgttattttgtccttcgacttcatatccttgggcacctgcggcacggacatattcgggagtaccttggcggatgttgtcctgtccgttgtcatagatacggaaacataacttcaatccccggtcgagcgctccttgaatcagctttttatagttctcgtcgtagatccaggcatattttccttcctccggttccatttccgaccaacgccagcgtatatagaagaaagatgcatagttacgtgcagcttcatcttgtgcagcccaatactcttctgcgttggctacattgccgactgcatcgtcataaagtccccaacccatgcagggattacgtagcagaccacttctgtcttgttgcaggtcaatagcttttgaacctttgggtatgccgttctgaccggattccgaatcggaatcggaacatccggcaaatagcgtcagacaacacgccagtaatatttgaaagtaatatcttttcataatgattcatgttttattagttattctgcatagatatagcgcatgacggttcctttagcccaggatacccataatgtttcgctgttgtcatggattaaagctcgccagggatcgttccaggttgcaggatcgcccaagtcggcggccataaagtagaatttttcctgagccagttcgattgcgttcctatccaagttccatgtacctgctgaagtaaagctcagtccccattcattcaaatgttcctgaccggtaggatctttataataatagacaggatctttaagaacattatacccgccattctttccggcttcagagaataaataattccattccgcttcggtcggtattctccagcctttcgggataatccggtcgcgaatcacaaaactgtaataggtaccgattgctttgatccagtcttctccaagggattcgggagcatatctgtaatattcggcttcgatttccgttccatccgggtatttggtagtattcagattttgggctgtccacacttgcgaagttccgtcggagaatgtcacgcggactacgggataagtgatcgtctcatctccacgtttgtcaaccaaacgcatcatgtcgtttgtgtataatgtgttggcgacacgcgaaataagtgactgatctgcattgttacgtacattccaataaatagtattggtccggtaacgcttgatagacagtttttcgattgtctgttccatttcttcgtgggtgatcgatatatttcctgttcctttggtcggcagttctacgaagttgtccatttccggatctaaagaaagaagtaccgtacactctgtatcattaccgattcctgaagcatcccattcaaattttattttggtttgtgtagcgtctgccaacaaagtggctgtcgacatatcttcaggagcaagcaagatacttttcattcgtctggcttgtagcgtacgaacttctgatgcggcggcagtctggttatttttatcttttacagtccagtaaatgagtctttcatttccggatttaatatctaacttggaaagtaattggttgataaccagtgctgatatattgcaattttttcctgtccctgcttctacggtaacttgtttcacaaggtccttggtagtgctgaatatcagtacggaaccttgttccgaagccttatcccaagtaaactcgtatgaatctttactttcatcatttaagtccatagttgctccttcggcgggagaactcagatatatgcccgacattggaattgtgatgtcggtcttataatcatcttcgcaaccggcgaacattagtagtccgatgatgctataaattaactttttcatgtttttttcttttcagtgattaataaccggggttctgtttgattattccctgaccttcgtcaataatatcttgtggaatagggaagcggtaacggtcttcatccacaagcgtttgtttacccattgattgagccttcttcttgatagcttccacaaataatccatagcggatcaggtcttggcggcggtttccttcgaaatataactcccaacctctttcgtccaatacagctttcagaaatttgtccacactgttcaaatcttgcaggctgtatcctttgcccggaagcgagcgggtacgcacttcattaagcaaatcaacagcttcctgcgttacggcattcttgttgcgtacaatagcctctgctgtcaaagtgagcacatcggcataccggtagataatccagtctatttgtgaatcttctcccgtacaatccggatcaaattcatatttcaatggaactgctcctaaatataattgagcggaaggatccggtctgtcattcttttcattatgtaccactccgtctttactggtatattcgtatgcaatcgtcagcaaacgtctgtctgccggatcaaaggtctgcataaaatcccatgagattttatatccgttccatttggtcattttatccagataagaagtgaaattatagtcgttgggtaatacatgaggttgccatttatgttcctggtatcctttggcacattggcaagcccagataatttccgggttcttctcatttgccagcgtgaatatatctttgtattcgggcacaagttcgaaaccatattcaggtttcatcagttcgcgtccctctgcttccgccttgtcccattgcttggtcagcatatagagttttagcaaaacagtatgtgccaatccggctgtaaaacgaccatagttcttatctccctttttgtagttggcaggcagtactttgcttgcttctgtaagttcagtctcgatatatgtctgcatttcttcctcgctgagtcgggggagaattttctcagccataggattcttgagtgtttccaggtcggcaatggggattggaccgtagaaatcatagagaaggtatgccagccaccccctgcccatacgaagttcggcgatgtattgctgtttgagggcatcgtccatttcaatatcgttcaaccggtcgatagtcagagtcattttactgatatcgtttacataggcgtagctctcaacagtcagccagctaccggaaccggatatcttgagggtgttccagttggcatagttgatgtggtcccaaccccagttgcacattccgtaatcgcctgcttcgtcgctgacgatttgtatgcctgttgctatattgaacagacctccatagccactatttttaaaggtggcgtatgcggcagacgttgtgatagcgtcagcgtcttctgccgttttggggaagatactggtgttgatatcaccatagttctcggagacgagttcacacgaagcgtttagtcctgcgatgaggcagcttccgagagcaagatatataagttttgtaattcttttcatgttcaattctttttaggtttatttagaatgaaatatctactccgatactaaaactagtgacgttgggatatgcattcgtgttactgtccgtttccggatcttggcctttccagttggtccatacacatggattgttgatgtcagcatacactcgcagtcggttacagatacttttactgattggcacggtgtagcctaatgtgatatttctgatacgcaggaatgaaattttctggagaaacagatcaccggtaccataagccgactcgatgaagctggggcgtgtacttgtctggttgtccgaactccaggcatccttgaaagagacaggtacattctgtcccagtttgatgcggtttccgtaagatccccaggcgtcgtaataactgtttgctccggcaattttacctacctgtccatacatatatatattaaggtcgaaattcttataagaaaaattgttgttgaaaccgaaaatgaatttggggtcattgcgtccgattaagaccatatcttcctcattcagtttatcatctccatttatattcttgagtttcacttgtccgggaagaagttgcggctggtgggcgggggcttcctcaccaggttgtaacagtccgtcggctacataggcaaagactccgcgaatcgggtcttgttccttctgataggcagcaggtttccagttcggatctcgttctttccaacggtcgttatacgttgagaaagttaaatcagtactccatgtaaactgtttagtctgtatattttgcgtgttcagagtcagttccacaccgttactttgagtcgaaccaatgttggctgcaatggttttcacttcattataatggggaatcgttttgttcttcaccagcaaatcggagatcgtacgctggaaatattcggcagtcaggttaatccggttgttgaaaaatcccaagtccagaccgatattaaattcggttgtcgtttcccatgtcaggttcgggttacctaattgtgatacatagatacctacgtgctgtgaatcaccgaattggctgccataccacgggtctgctccataatagtcgagagctccgttgcctacattataattaccggtttgtccccaacttaagcgtagtttaccattcgaaagaaagtcagaggaagaactcttgataaatttttcttcggagaagcgccagccggcggatacggaagggaaataaccccattgatgtcctttggcaaagttggaggcgccgtcggcacgaatggtggcagtgagcaggtatttttctttccacgaataattgaaacgtccgaagtaagaactcaagctgcttaccgaagcgtacgaacctaccggcggtcgactatagtttcctgctcccagattattgtacaggaatgaatcattgataaaatcttgattacctgcactcattccttcggtgttgaacttctgataggaataaccgaaaagaacattgaaactatgttcaccaaatattttttgataattggctgtcaaatccattaaatagtcgttgttatcttcctgggctaaatatgcctgaccgttgactgccgccccgtattgagtggttttcggaagataagtttttcgtttctgatattttcggtcgatacccaaattggcttttagtttcagtcccttgatgggttccacttctatataagccgaacccaacaatcgttcctttacagttttatcattaatttcgaggagagacaccgggttcgggagttgaggcatctgaggattggtcgaataatttcctttttcatctctgacgggaacagtcgggttgaaagcaacagcagcagtaatgataccggaattttcattctcgccgtttcccaaaggtacattatcgtagttattacggctaatattgaaagacaatccggcctttacgtacttggaaatctgctggtccagatttatttttgcagtgaagcgctccatgtcattatttttcactacaccggagtggttgaggtagttgatagaagccatatatttcgttttttccgttccgccgtttatagaaacattatgctggtgcataagtccggtacgtgtgatttcgtcaaaccaaggaactgtcggcgcgttgagtatctggtcgttcgagtatctgggcttaaagtccgccgcatcatcattcggaatcatataatcctcgtaaatgccttctcctttttctttcagccatagctcgtgataatatcggttggtctgatacatatagtcctgcccgttcaacatcttgaatgagtttttcattctttgcacagagacattggctgagtagttgacgcttgcttttccttcttttccccgtttggtagtaacgataatcacaccgtgtccggcccttgcaccgtagatagcggtagagctggcgtctttcagaacctctatcgactcaatgtcattcggattgatagattcgagaatattatcggtttgccccgcttcgtaacgattgcccgaaccaagcgtagaactggaagaaacgggaaaaccgtcaatgatgataagcggatcgttcccggcgccgacagaggctgctccacgtatattgaaactactgccgccgcctacctgtgcactcgtctgcactacttgcagacctgctgcttttccggctaacgcatggctgaccgtcgtgaaggtctgcacgggagtttcatccattttgatagaagaaatggcaccggtcaggtctcttttcttcatcgttccgtaccctacaacgacaacttcatccaacgcctgcgcgtcttctttcattgagatagccagatgcgttttgtttctggtattcacttcctgcgtcagatatcccaagtaagatatttgtacgctactaccttcgtcgacagtgagctgaaactttccgtcaatatcggagatagtcccatttgtaccatttttttctttgatattggcaccgatgatcggttccccgtaattgtctgtgatgattccgctgattgtactttttttcttctgttgtgtggcttggttacttttcttttttataatgatgtctttaccttgaactgtataactaacattttgtcctattaaaatctgttccactaccttctctatgggtaggttccttgctgttaccgtaataatcttctgggtattcagatcgcttgccgcaaatgtaaatgaatatccattttgcttctgtatggtttcaatggcctgttttacagtcacgttcttcaactgcatactgatatgctgtgcaaatgagttcagatgaagacataacatgagcaggaccatgaaaaaaaactttttcttagttttcataagtcaatgaataaataattgataaataggatgagaagtttaggattttatttatatttgcctaagctttcatcgataaagtcactgaggcttttaagacagaaagttaaaaggaggtcaggggttggaaaggaacctgacctttttttatttctatctgggagagtaaaatcatgttttttcaaagttgcttttcatattcttttaagttttcaaaggtttaacattcagtctcattcaggaagtgtgatcacaatattttttccctcaatgatataagtcattttatcggtagatgatagtacatccataatttcccggatactctgttcccttctgcggaaattaccatagaaacggacggagtttagagcagcgtctgcaatagtgatttttatgttgtagcttctttctagttccttcacaatatcggggagcagcgcttcgtcgaaatagagacggtcgtttgtccattcggcactgtaagcagctttagtacttgaaatcaataattttccggtcttcttgtctaatagggcttgctgatccgggtgaagtatcgtttccttttgttgggtgctgagagccactttaccttcgagcaaacaaactttcgcttccagatcatcctgataatttctgaaattgaatttggttcctaatacctttacgtccagttcatcagtatgtactttaaaaggaatatgtttattcttggttacttcgaaataagcttctccggtaagattcagtgcccgttcgttgataccgaagtcttgcgcataactcatcttcgaaccggcattgagccagaccagcgtcccgtccggaagatataatttggtttttgagccgtatggggcttcaatggaaatttgggttaactgcttgcggataacactctttcctgtctggaaagcaatcgttccgcaaataaagacaatgatagtcatcgcggcagcatacatccatgggcgaagttggaaagccttgcgtttattgataccttgttgggtagtttctccggttcgtctcaggaatagttgataagctctgtctttgttgaagctatgaacatcgtctgcctcattcgaggcggctatccatacctcctgtatatcggagaaatattttctgttttcttccgaggcattcagccattcttgaaatgattgcatttcttccggtgtcaggctattggtcagatatccggtaatccaatcgtggactgtgtctgtatgtagtgattgttcatccataaataatgattgcctttatatatactacagttttttagaataagagggtagggtaaaaagcgagaaaaatgcataaaaaagttccaaattctttcttgagtactactaatgcgttctttatgtgatatttaaccgtattgacggagatgccaagttcctgagaaatttcttcgtagctcatctctcggaagcggctcatcataaatacctgcttgcagacagggggaagtttttgaatcacttcctgaattttatgttccagttctttctttattagcgtccctagaggttgctgattgtctgggatgatattttgcagttggattcctgcccgttccataacagaaaaacggatttccacttcttgttgtttgagagccagataattcaggcatttattacgtacggctataattaagtaattacgtagaggaggaacaagttccagattctccctaatctcccataagtgaaaaataacatcactgactatactttctgcttgtattttatccttcagcatataataactaagtttgcagagagcaacataatgatagtcatacaaatacttgtatgcctcgttgtctcctgcctttagcttttttattatgattttttcatcaactggattcatagtgtgctttttcatctctgcaatattcggataatatattgaaagatgcaaattaattggaggaaaaatactctctccccattttcatttatgatatattcttccacaaactaaaaactgaggatatgaaaaattaatgatgattactgattgaaatatgaatacatttatatcttgtattttaattaattttttcatatttttgcagggtatttttgaatatttgtgaaagacatgaatggttttgtaaaaatgggaagatgtttgttttttgtgcttcttctcataagtagtactgtaagtaaagggcagatttataagtatataggtctggaggacggtttgaataaccaaaaaatataccatatccaaaaggaccaacggggctatatgtggtttctgactcaggaggggatagaccgttatgatggcaaacatatcaagcattacaacttttcagacgacagtatgaaactggattcacgtattgccttaaactggctctacatggacagcgaaaatgtattatgggtaatcggtcagaaaggtcgtattttcaggtacgatttgcaacatgataaattcgaactggcttatgtgcatccggagttgattagaaataagtcgcaggcatttctgaattacggttatttggacaagagtgaccgtatatggttatgctgtaaagatagtattatctggtataatattcgtaccggaacaacgacacatatgccggcgccggctattggtgaaataactaccattgaacaggcggatggtaaccatttttttattggtacgggaagcggtctgtttcgtgccggaataggagatgggagtttgaaactgctatccgatgaaacggtggaaagtatcagtacaccagtgcatgaactctattatcatgtcgtctcaaaacaactgtttataggaagctacaaagagggtgtacttatatatgacatggaggggacagggaaaatcattccttgtcaatcacccaataatgtagagataaaccagatagttgctttgaacgctcatgagcttttggtagctacgggtggaaaaggtgtatataaactggatgtgaatacctatatgagtgagccctatataactgccaattatagtagttataacgggatgaacggaaacaatatcaatgatatctatgtagatgaagaagaacgtatctggcttgccaattatcctaccggtattaccgttcgtaacaaccgttatggaagttatgacttgataaggcattctcttggcaatagccgctcactggtgaacgatcaggttcatgatgtattggaggacagtgatggcgacctttggtttgcaaccagtaacggtatcagtatctatcagactgatacaaaagaatggcgttcttttttcagttcttttgatccggtacctgatgatgaaaatcacattttcttagcgttgtgtgaagtctctcccggtgtgatatgggcgggcggttttacatcaggtatttacaagatagaaaagaagaaggggtttaagataagttacctttctcctgctgctattgcaggggtacggcccgatcaatatatttttgacataaaaaaagactcgggcggtgatatatggtccggagggtattatcatttgaaacgcatcaatcttgagactaaaagtgtgcgtttatatccgggagtaaactctatcactaccattcaggagaaggattcccggcagatgtggattggtacccgaatggggctctatctgcttgacaaacaatccggagtttacaggtatattgacctgcctgttgaatctctctatatatgcgcattataccaaagagaagacggaattttgtatattggtacccgtggagccggacttcttgtttatgacattaataagaagaactttattcatcagtaccgaagtgacaactgtgcactgatctccgataatatttatacaattcttccgcgtcaggacgggagtctcctgatgggtacggaaaatggcataacgatttattcacctgaggagcacttctttcgtaactggacacgggaacaaggattgatgagtgttaattttaatgcaggctctgctacgacctataacaaaagtgcgcttgttttcgggggaaatgacggtgctgtcaaatttccaacagacatacagataccggagccacattattcgcgtttgctattgcgtgattttatgatagcttatcatcctgtttacccgggtgatgaaggatcacctttggaaaaggatattgacgaaactgaccggctggaactagcttacggacaaaacacgttttctcttgatgtagcttctatcaactatgattatccttccaatattcttttttcatggaaaatcgatggttatcataaagagtggagccgtccgagtcaggataaccggattatcatcagaaatctgcctcccggcagttatacattacaaattcgtgccgtatccaatgaagaaaaatataagacttatgagacaagaagcattcagattattataacgcctcctgtatgggccagtgtatgggctatggtgggatatgtaattctgttggtgttggttatgggtattatattccgtatcatcatgttgcataaacagaagaaggtgtcggacgaaaaaacacggttcttcattaatacggcacacgacatacgtacaccgttaacattgataaaagctccattggaggaagtcttggaaaatcgcatgggggctgaacaggcactacctcatataaatatggctcttaaaaatgtgaatacattacttcagttgacaaccaacctgataaatttcgaacggatagatgtctactcttccactctttatgtttctgagtatgagttgaatacttatatgaatgatgtttgcgccactttccgcaaatatgccgagatgaagcatgtcaggtttgtttatgaaagcaattttgactatttgagtgtgtggtttgatagtgacaaaatgggctctattctgaagaatattctctcaaatgcattgaaatatacacctgaagacggtagtgtgtgtatttacgcttccgaggaaggaaatagttggagtattgaggtgaaagatacgggaatcggtattccaacgtgtgaacagaagaaattgttcagaaactattttcggggtagtaatgtcgttaatctgaaggtgacaggtagcggaatcggactgatgctggtatacaaactggttaagttacataaaggtaagattcagattcagagtgctgaaaatcaaggaacttgtgtacggattacttttccgaaaggaaatagccatttccataaagcaaaatttatctctcccaaaacaccggatgaacgtttggagactattgtaacaggtgatacgccgggattaccggatatggagatatcccggatcaacagttccttgcagcgtattttgatagtggaggacactactgtcccgtaaaagtggataattagttctttgaaattattgaaatatagtcaattacgcggttttttaaaatgaaacggacttgattttgcaactttgcagtctaatacaaatggctgctatgttccaagacaaatacgtattctctcaattaaccgcttttctgaacaggactcagttcaacaactatgttcgcaagtatgatggcaacagatatgtgaaacatttcacttgctggaatcagatgctcgcgatgatgtttggacaactgagtaaccgtgaaagcctgcgagacttaatcgttgctttcgaggcgcatagggccaagcaatatcatcttggtttaggtcgtgaaccgatagccaaaacaactcttgcgacagccaaccagaaccgtgattacagaatcttcgaagactttgcattctatatgatgaaggaagcctgcgagaagcggacgaccaacatccttgacatttccggaaagaaatatgcgtttgattcaacaacgattccgttgtgtcttgcaacattcccatgggcaaagttccgaagcaagaaaggaggggtgaaagctcatgtcttatacgacattgaagcacaagttcctgctttctataccgtaaccactgcttcaaagcatgattccacagcaatgtcttcaatccattatgaaccaaatgcttattatatattcgacagggcttatgactcctttaaagaactctataggatacatcttacagactctttctttgttgtcagagccaagacaaacttaaagtataagacagtcaaatggaagcgaagaatgccaaagaacataatgacagatgcggaagtgaaactgaccggatatctctccgagaaaaaatatcctgagtcattcagactcgtccgatattacgacgaagaggatgaccgtgagttcactttcttgacgaatgcaaaacaactttctgcactggatgtcgccaatctttataagaaaagatggttaatcgagctgttcttcaaatggctcaagcagcatctcaagataaagaaattctggggcacaacagagaacgctgttcgcatacaaatcagtgtggctattatcacgtactgtcttgtggctattgtccaacatgatatgaagttgaaacgttcaacctatgaagttttgcaaattctcagcatatcattgactgacaaaacccacttgcgtgacctgttcgacaagactaatttcaatgatgtcaaagatctaaatgatcccctgattccggggctttttgattaattgtttaactcgtcccattttaacgggacactaatgagtggaggataatgatgatttgcgtaattatctggtggatatgcttcggacgggttataatatccagtcctgtccgaatggaaaggaggctcttattataatccgggaatttaatccggatctcgtcatatccgatataatgatgcctgagatgggtggagatgaactttgtgcaactataaagggggatcttgagatgtctcatattccggttgttttgctgactgcgctgggggatgagaaacatatgctcgaaggattggaaatcggagcggatgcttatattaccaaaccttttagtgtggggatactcaaagcaacgattaagaacatactaacaaatcgtgctttgctccgccgggtttataatagtatcgaagatgaagaaccgaattttccggttaattgcactaataccttagactggaaattcattgcttctgtcaaggaatgtatagagaagaacatgggggattcggactttaatgtggaaatgctcagcaacctgcattatatgagtcgtacgagcttcttcaacaaactcaaggcattgactggctatgctccggctgattatatccggctgatacgtttgcaacatgctgcacagttgctgaagcagggtgaatatacaataacggagattgccgacaaagtcggattctcggatgcgaaatatttccgtgaggtatttaaaaagtattatggagtaagtccgagtaagtatgtagaggcggagaagatacattctcagtcttcagagcaagactgactagtaaaaagccctgtaagaatgattggttctcacagggctttttctatgtcttaattttatggaaaaggggtacttaaatttataaccctcaaatccgcaactacgcgcctaatatgatacagaagcgaaaagaatctgcatcgttagtaaaaagggggcacagtgcatcgaatgtcaccataaagacatataaatgccccttaccccaccatgcgacttgaggcaatacgcaaaatcacgactataagttgtcggtgttatccaaagtcattctggaacacattggcataagcattgttgcatgaatagatattcagcacatacttccttgatgtcctgacccatttggctggcacagagatgaacttaaagacaaacgtcttgatgcggcttgttgctttgagtccgaacctcttcacgtcaagcctcgccatgatgaatttatagaagttgcgtatgagtgccataagcagaagaaacaccgtgttttctcccataaaggattttggaagcctgttccagccgaatccgttattcatatcatcgaagatgcgttccttccctccacggaggttatagaattcgacaatctctttctcggaagactcgtagtcatttgtaaggatgcagcggtaggtgtattctccttcccacaggtcgagttcgccgtctatccgcttctgtctttgaatcacaagacggtatgccttccctttccatttctcgatgagaatggaggccagctcaaactcaatgccgcccaattccactttcttccaacctctgagggcaaagatgtcattgtagagcgaactgcatcggttagcacggatatagaaggtcttgcagtgtttagcaatctcttccactatctcttcagaacacgagccgcaatcagctctgaaacggttgataataagcttgttttgttcaaacctttcaaagaacctcttcagcgtgtccttctggtggaaacggacatttgtgttgccgtcgctgttctcaatgccgacaatcaagttgccaataaccgccacgccagggcgataaccaaggaacttcttgtatgtaggcttcgcatcaaacttctcagcctctatgaactggtggtcgaagtcaacgtcatacccctcgccctctttcagctgccctgtggacaataggcaattgaggagcagtgtattcagcttgtctgccgtgttgaagtcgtaggtcttgccagtgtcggatgtgtaggaaatgttatcctgggtcagttcctttatggctctaagaatcgtgtcggcactgcatgtgcgaagtgtcggatgaagcgaaaggtggtacatcagatgagtggtgacatcctcgatgcatgagccgccacaaaaataaacgctcataagcgaacggatgatttcgctgtattgataaccatacagcctgcatctcataccgagggttgagtcgattacagatgagagtctggagtcaaattgctccattattgaaaatattcctccaaaaggagtgagtttctcggatttaattgctacctttgccatgtctgtcgggtttgatacatattttgatttgcaacactaagataggtgaaaaatctgacatggcaaattcctgagcaactttttgttgctcaggtacttaaaaagttatatttgtaatagtgttgcggaattaaggataacatcttattagaaccaagtataatcaacatggtatatccaagtatcagtccgataattcccatgattataccgactttctccatatccttttgttggatcatgcctgtggcatgtgccaaagcgttgggcggagtactgataggcaatatcattgctaatgatgaaccgattgccactccgatcaataaagtttctacacctcccagcgaagacaggttctcacgcatactgcttcccgcaatggcaagaatgggaacgagcaatgcggcagtcgccgtgtgtgagatgaagtttgccatggcgtaacaaatcagtccggagccgacaatcattaatacaggaggccatgtgttgaatgggattgcttcgatcatgtgtttggcgagtccggtttcctgtaaggcaacccctagtgcgaagccgccggctaccatccagagtacgctccagctgatttcttccaggtcgcgtttggtgataactcctgttatacagaatacggctaccggaatcatggctaccacgttggagttaactcctgtcaccttgtcgaacatccataatacgaccgtgatggcgaaagtaatataaactacgatcgaacgccagtccttttttgcttcgccttcaatttgtaattcaatattcttttgtttgaaagggaacaaccgcaaaagaataaaccatgcaataaacagtacgataatggtgtaaggcagcataaaactcatccattctccgaagccgatattcaagttcaacccttccggatcattcaggtattttagtgcaatggcgttgggtggcgtaccgataggagttcccataccgcctacattagcagctacgggaatggccatggccagaccgatttttcctttgccgtctgccggaagtgcctttaatacaggggtgaggaaagtgagcatcatggcagctgtagccgtgttgctgaggaacattgaaaatgcagccgtaacaagaatgaatcctaataatacatagcgtgattgtgttccgaaggggcgtaacatgacacgtgccaacaatacgtccagaccgcttttggtcgcagcaatggcaagtatgaatccaccgataaataacatgatgataggatcggcaaagcagtgcataatggacttatatttaactgtctgtcccaattctcctgctggaatatcttgagtgaggaaccataaactgctgtcggaaacggtaagtaatagtaatacgacaatcagtacggaagtagtccatgcagggacagcttcgaaaacccacataagtgtggcaaaaataaagatagaaatcagtctttgttctataacggttaacccttctataccaaatgtgtcgatagggaggagccatagaataagggaaatggtaatagctacggttaacttaatacatctggccactgcctgattctttgccaaccgtctggctttctttaaatcctgataagcttccactagatggaagccatgaaaaatcttgtacataatattagtttaagataaaattaaaaaacggtgcaaaaatagctttttattctatatgtcataatttagcgagaaagttttttcaaagcctttcctattaaaatgtttttaagggagtattatagtaggttgctaatttattatttttatttttgtaccgttcttttgttgatttgataataactataattaaaaccatgaaaaaactgacagtcttactaatgtgtgtatgttgtgtatttactgcacaggcacaaaagcaatttactctgaattctccgggcgggaatctgcaaactactattaccataggcgatcaactgacttacgatattacttgtgacggacggcagattctggctccctcgccgatagccatgtcgttggacaacggagaagtatggggtgagaaagcgaaattgtccggtacttcccggaaaagtgttgatcgtatggtgtcttctcccttctatcgtgccaatgaattgagagatcattataatgaactgacattgcggtttaaaaaagactggaatgtggaatttcgagcatacgatgacggaatcgtttatcgctttgttagtcgggctaagaagcctttcaatgtgctggatgagattgttgactatcagttcccgtttgatgcggttgcttccgtgccttatgtgaatagaggaaaggacggtgattatgaatctcagttcttcaactcttttgaaaatacatatgttacaaataatctgtctaaacaaaataagaagcgtttgatgtttctgccgctagtggtggaagccggtgatggggttaagatttgtattaccgagtccgatctggagaattatccggggcttttcttgtctgctgctaaaggtgaaaatcggttgagcggcaaatttgctccatatccgaagcgtactgttcagggcggacataacaaacttcagatgttggtggcagaacgcgaggattatatagcaaaggtggataagcccagaagtttcccatggcgcatggctattgtgactacttccgataaagacttggcgtcaagtaatctgagctatttgctggctgcgccttcacgcttgtcggatctttcatggatcaaacccggcaaagtggcttgggattggtggaacgcatggaacttggatagtgtcgatttcgctaccggagtgaataatgctacttataaagcatatattgattttgcttcgtcaaagggcatagaatatgtgatacttgatgaaggttgggcggtcaatctgaaggcggacctgatgcaggtggtgaaagatattgatttgaaagagttggtagattatgccgctgacagaaatgtaggtatcattctttgggcaggttattatgctttcgaacgtgatatggagaatgtctgccgtcattatgctgcaatgggggtgaaaggcttcaaagtcgacttcatggaccgtgacgatcaggaaatgaccgcattcaactaccgggccgccgagacttgtgctaaatataagatgatcctcgatttgcacggcacacacaaaccggcaggtctgaaccgtacttatccgaatgtgttgaacttcgaaggggtaaacggactggagcagatgaagtggagcccggcttcactcgatcaggtgaaatatgatgtgatgattccttttattcgtcaggtttccggtcctatggactatacacagggcgcgatgaggaatgcttcgaaaggtaattattatccttgcaattcagaaccgatgagccaggggacacgttgccggcagttggctttgtatgtggtgttcgagtcacctttcaatatgttatgtgataacccgagcaactatatgcgcgagccggaatcaacagatttcatagctgccattccgactgtatgggatgaaagcattgtgcttgacggtaaaatgggagagtacattgtcactgcacgccggaaaggggatgtctggtatataggcggaattactgattggacggccagggatatcgaagtcgattgttcttttttgggagataaggcatataacgccactttatttaaagacggagtcaatgctcaccgtgtcggacgtgactataaacgggaatctttctctgtaaagaaggatagcaagttgaaaattcatctggctcccggaggaggttttgcacttcaaataaaatagccgttttaaggtataataaaaagctatgtcataggtatggtttgaaactgattcggtgctgcatcagggctttgatacagcaccgaattttctttgttacgataatgccgcaatggctgtacctatcagattcgcattattcatactttttatatcaactgtaacatctttcaaaccgaacaagtcgaaaagctcctttaattcctctgtaacaatactgtgataattcttatcttttctgttctcactccagaaaagactgccttcagccaccaggcaaatcctacgtatatctttattgtatgatttcaacaacatgacaagccctgtaattgaagcggccaccaactgtgccgatctggtatatatccattgcgccacttgtacatatacatccttgtatatatccggatagttcatgatagcggtaagtttttgcgcatcaaatttttcttcaaattcttctaaaggaaaagttgcttttaaaatatctcccagatacataccggatactgctttctcgaaacgttgttttctggggttaccggaaattacatcgactgtattatccactccggtaagaaatggcggatgaaaattcccggattccaaattgacgggaatcatgccttgaatattatccgctggattcagcttttttattttgtcggctgggatgaaagtagccatattagtgcctgttcctacaatcagtcctatatatgcgtcataactgttgtctgtaagtcctgcaaataaactggctacggtgtcattcaatacttttatatccgtaaacttgattttattcttttcattcaggtagttgagtaggggattcccgatatattttccaatcatctctttgatgtcaactccctttgtccagcgcagcagttttgcatccccgccgggcacggattcggtcggataagaaaagcaatagccgataggcatttcctcctcccgttttattccggtgatcatatctgccaactctttaaataattcctcttgggtataccccagcgatttcatgatcgacatatctttcttccaaccattgttgggatgaatgtccggtaccgatttgctgaaatcaacgagtgctacccgataattggttcctccgagatcaagcacaagtgatttaccgttgatattgtcagccttcggagtaataaaggtaggaatgcattggatttcagcgttttcagtgttcaatcctttttctactttttctttaaatgaacgggctattgctttgagctgttcattatctaacttaaaaatatttttctccatgatattgactttttaatctatataatatgtttatgtatgaataacaactaaagctttgttttgcttctctcttttttatttagtaactattcttattctctctcaccaacttcctccacctctgaaacgccctcatcaaggtttcttcctgtatcacttcttccatttcataatgttccacaaagagatacatcgactttttatacattattcttattattataaaacaacattggaatttagattggatttcttggtatggacatagtgaaatgtgttttttggcttatgatgaatcaaaaaataatcaatataaaccttttttttcctatggtttgacggaaaatgttgatggacatttggtaggaacatcatttcataattttgatatgccgcttattaggtatgatacaggggatttgattgcttctgaaaatagaaaagggcaattaatggaagcattttcaattacacaaggaaggaatgccaacgctttatccgattcatatctcatattctcatgttttttgtataactaatttattctcaattaattaatttatgagaaataaaaagggacagagttatttctcatagtttttctgttgttttccctcataatcgattcatttctcatagcctcctctcctgttctttcttctctctactccatatttttctcctgccttgtgcttttcccctatcctcttttttgttccactccggtggccgggctttttcactccggtggccggttctttccactgaagttccctgtcctgttcattgtagtggaacgaacagcatgtcttttcgattatccgttattctcctccttccggaaggatgattcgcctcaggggtaggtggtatgtaaatgtcggaatgggtaattccccgctttttatatccggcctgttttttttagtaccgaataaatctgcctgcattacttgtttctttgtttagtgctttcctccctcgtttaaatataataatgtgtatagttttgtattcttcccttcgtagcttcttgtatagaaacggcggttttcttgaaccagcctatcaatcagcaagttagtctgattataaaaaaataatcagaaaaaagagtgatatatatttgttttgtatcctgaaagggagtacttttgcacccgctttccgagagaagaaagccttgatgaaaatgacttagtgacaaagcgcaggactgcttgactcaagaacaaaaaaaacttccgaaaagttttggaatataaataaaaaagttcttatctttgcagtccgattcgcaaagaaaaggtgttttgcttgttcttctttctatttattctttccctttcgcatagagagtctgagaaacggataaaaagaaaaactgaaaaaaaacttccgaaaaagtttggtagttaaaaataaacctcttacctttgcacccgcttttgaaacggaagcgacaagttctttgaaatattgataaacaatacaagtagtacaagaaaagatagaaccgtcaatacagtctgttatatatgttcatatatatgtgatagatataggtattagaatgaagtcaataaattgtacggcatcctgaacagagctataaccggcatatgccgattaaaaaatacttttacaatgaagagtttgatcctggctcaggatgaacgctagctacaggcttaacacatgcaagtcgaggggcatcagtttggtttgcttgcaaaccaaagctggcgaccggcgcacgggtgagtaacacgtatccaacctgcctcatactcggggatagcctttcgaaagaaagattaatatccgatagcatatatttcccgcatgggttttatattaaagaaattcggtatgagatggggatgcgttccattagtttgttggcggggtaacggcccaccaagactacgatggataggggttctgagaggaaggtcccccacattggaactgagacacggtccaaactcctacgggaggcagcagtgaggaatattggtcaatggacgcgagtctgaaccagccaagtagcgtgaaggatgactgccctatgggttgtaaacttcttttatatgggaataaagtggtccacgtgtggatttttgtatgtaccatatgaataaggatcggctaactccgtgccagcagccgcggtaatacggaggatccgagcgttatccggatttattgggtttaaagggagcgtaggcggattgttaagtcagttgtgaaagtttgcggctcaaccgtaaaattgcagttgatactggcagtcttgagtgcagtagaggtgggcggaattcgtggtgtagcggtgaaatgcttagatatcacgaagaactccgattgcgaaggcagctcactggagtgtaactgacgctgatgctcgaaagtgtgggtatcaaacaggattagataccctggtagtccacacagtaaacgatgaatactcgctgtttgcgatatacagtaagcggccaagcgaaagcattaagtattccacctggggagtacgccggcaacggtgaaactcaaaggaattgacgggggcccgcacaagcggaggaacatgtggtttaattcgatgatacgcgaggaaccttacccgggcttaaattgcaaatgaattatggggaaacccataggccgtaaggcatttgtgaaggtgctgcatggttgtcgtcagctcgtgccgtgaggtgtcggcttaagtgccataacgagcgcaacccttatcttcagttactaacaggtcatgctgaggactctggagagactgccgtcgtaagatgtgaggaaggtggggatgacgtcaaatcagcacggcccttacgtccggggctacacacgtgttacaatggggggtacagaaggccgctacctggtgacaggatgccaatcccaaaaacctctctcagttcggatcgaagtctgcaacccgacttcgtgaagctggattcgctagtaatcgcgcatcagccatggcgcggtgaatacgttcccgggccttgtacacaccgcccgtcaagccatgaaagccgggggtacctgaagtacgtaaccgcaaggagcgtcctagggtaaaactggtaattggggctaagtcgtaacaaggtagccgtaccggaaggtgcggctggaacacctcctttctggagcgatgtcgttacaatgacttcatggttcatttcctttaggggaatattgaaccgggttctgttcagattgtactactggtacttgtttatttataatatatagatcaaccatctatagtaatatagatagagataaacaagagaaaacagaagccgagtctaaagacagacacggttgaactagtcctatagctcagttggttagagcgctacactgataatgtagaggtcggcagttcaactctgcctgggactactccgaaacgactcttacgggggattagctcagctggctagagcatctgccttgcacgcagagggtcaacggttcgaatccgttattctccacatccccagcaatgggaaacgatctttgacatgatgtacaaaaagtaaaataaaagtaaagagctaaaagtatatatcaaaccgtactctctccgatatttcccatttcagtaatggatagttttcggagcagtcagtttgaaagaaagtaagcaagggcgcatggcggatgccttggctctcggaggcgatgaaggacgtgataagctgcgataagcttcgggtaggtgcaaataacctttgatccgaagatttccgaatgggacaacccgacattctgaaggaatgtcatcctgcttggcaggaggctaacgcagggaactgaaacatcttagtacctgtaggaaaagaaaataataatgattccccaagtagtggcgagcgaacggggattagcccaaaccaatgttgttacggcaatattggggttgtaggaccacgttgtcgcaagacattcagtgagaagaattctttggaaaatgaaaccatagacggtgatagtccggtattcgaagctgaacgaagcgtagtggtatcctgagtagcgcgggacacgaggaatcttgcgtgaaccagccgggaccatccggtaaggctaaatactcccgagagaccgatagcgaaccagtactgtgaaggaaaggtgaaaagcacttcgaatagaagagtgaaatagtccctgaaaccatgcgcctacaagcggtcggagcagcttatgctgtgacggcgtgccttttgcataatgaacctacgagttactttttccggcaaggttaaggatctggagatccgtagccgaagcgaaagcgagtctgaacagggcgataagtcggaaggagtagacgcgaaaccaagtgatctacccttggccaggttgaaggttaggtaacactaactggaggaccgaaccgataagcgttgaaaagcttccggatgagctgagggtgggggtgaaaggctaatcaaacttggagatagctcgtactccccgaaatgcatttaggtgcagccttgtgagttactaatgtgaggtagagcgactgataagatgcgagggcttcaccgcctatcaagtcttgataaactccgaatgcgcattagttctatcacaggagtgagggcatgggtgctaaggtccatgtcctaaaggagaagaatccggaccatcagctaaggtcccgaaatagatactaagttgaactaacgaagtcagattgctaagacagctaggatgttggcttggaagcagccattcatttaaagagtgcgtaacagctcactagtcgaggagtttggcgtggataataatcgggcatcaagtatcttaccgaagctatgggatcattaatgatcggtaggggagcattccactccgcgtcgaaggtgaagcgtgagctttgctggagcgtgtggaaaagcaaatgtaggtataagtaacgataaagggggtgagaaaccccctcgccgaaagactaaggtttcctgatcaacgctaatcggatcagggttagtcgggtcctaaggctcagccgaacggtgaggccgatggcagaacaggttaatattcctgtactaccttaaggagtgacgtggagacggagtcgtgacaacgccgcggactgacggaatagtccgttgaagggtgtagatgttgattgtggcaggcaaatccaccacgagagtcgaacctgatagtataccaattccttcgggaaacggtaatagtgcgtgtaaacatactcccgagaaaatccgctaaacttaatccttgaggtacccgtaccgcaaacggacacacgtagtcgggttgaatatactaaggcgcttgagtgattcacggttaaggaactaggcaaattgaccctgtaacttcgggataaagggtcccaacgagagttgggcgcagagaataggtccaggcaactgtttaacaaaaacacagggctgtgccaaattgaaagatcacgtatacagcctgacacctgcccggtgctggaaggttaagaggagatgtcatcgcaagagaagcattgaattgaagccccagtaaacggcggccgtaactataacggtcctaaggtagcgaaattccttgtcgggtaagttccgacctgcacgaatggtgtaatgatctggacactgtctcaaccgtgagctcagtgaaattgtagtatcggtgaagatgccgattacccgcgatgggacgaaaagaccccgtgaacctttactatagcttaacattgaatttgggtaattgatgtgtaggataggccggagactttgaagcgcagacgccagtttgtgtggagtcgctgttgaaatacggccctttgattatttgagttctaacccgttgtaacggggacactgtttggtgggtagtttgactggggtggtcgcctccaaaagtgtaacggaggcttctaaaggtgccctcaggacgattggtaaccgtccgtagagtgtaatggcataagggcgcttgactgggagacatacaagtcgatcaggtaggaaactagagcatagtgatccggtgtttccgcatggaagggacatcgctcaaaggataaaaggtactccggggataacaggctgatccctcccaagagctcatatcgacggaggggtttggcacctcgatgtcggctcgtcacatcctggggctggagaaggtcccaagggttgggctgttcgcccattaaagtggcacgcgagctgggttcagaacgtcgtgagacagttcggtctctatctatcgtgggcgtatgaaatttgcgtggctctgacactagtacgagaggaccgtgttggactgacctctggtttaccagttgtgccgccaggtgcattgctgggtatctaagtcgggattggataagtgctgaaagcatctaagtacgaagccagccacaagattagatttcttagggtcgtcaaagacgatgacgttgataggatgcaggtgtacaggtggtaacatcatagccgagcattactaattgcccgtccactttctttctgcgggacggttgttatatacgtttagcttgtcaaatgtctttcattttacttttcgtcatgtcataacctttttcaggtggttatagcacgagggttccacctcttcccattccgaacagagaagttaagcctcgtcacgccgatggtactgcgtaacagtgggagagtaggtagccgccgttttttatgaagccccttcagtagaaataccggaggggcttcgtctgttttggtagtctgggaaatttatgctatatttgtcaccgacaattattttattcaacgtttaaagcaaatttaaagagtatgaaaacgaaactatttttagctgctgttgcagtaacattttcctttgcaatgatgtcttgtgcaggtaacaaaactaataatgctgctactgaaggcgaagaaacaactgtagaaacagtagaagctgctgccgttgttgaagaagctgattcttgctgccaggctaaagattcttgcgctactgcttgcgacaagaaagcagactgtgcagaaaagaaagaatgctgcaataagaagtaatctattgacttagaacgataacgaaagaggggacgaagtgtataagacacgacgttccctttttctgtttaatggaacttacctctataagtgatacattatttataaaatttgcctttaacttatgaaatgaagttttttatgataaaaaagtaacgtattatttggtggtaaagaaattatctatacctttgcaccgtcaaactaataaaagagacaaaagatgaatcagatgtttatacatattctactatgcggtattattattctactatcaagggttagtggaagtgagtgctacgcgtaaatgtgtataataaagatatacgaaagcctttctcacttccatgtgtgaaaggcttttttaatgctaataattatataatataaatagaagatggacaataggttatttatttttgataccacccttcgcgatggtgaacaggttccgggatgtcagttgaatacagtagaaaagattcaagttgcgaaggcattggaagctttgggagtagacgtgattgaagcaggattcccaatttcaagtccgggtgattttaattctgtgattgagatttctaaagcggtgacctggcctactatttgtgccttgacccgtgctgttcaaaaggatattgatgtagctgtagacgcattgaagtttgctaagcacaaacggattcatacaggtatcggaacttctgattcgcatatcaaatacaaattcaattcgaaccgtgaagaaattatcgaacgtgcggtagctgctgtaaaatatgcgcgtcgttttgtggatgatgtggaattttatgcagaagatgcaggccgtacggataatgaatatctggcacgtgtggtagaagctgttattaaagccggtgctacggtggtgaacattccggatacgaccggttactgtttgccttctgaatatggtgccaagattaaatacctgattgaccatgtagacggtattgataatgcaattatctctactcattgccacaacgatttgggtatggcaactgcaaacactatagcaggtgtcttgaacggtgcccgtcaggtggaagttacaattaacggtatcggtgaacgtgccggtaacactgcactcgaagaaatcgctatgattatcaagagtcatcacgaaatcgatatccagacaaatatcaatacccagaagatttatccgacaagccgcatggtatccagtttgatgaatatgccggtacagccgaataaggcgattgtcggacggaatgcttttgcacactcttccggtatccatcaggacggtgtcttgaagaatgtacagacctatgagattattgatccgcacgatgtgggtatcgatgataactctatcgtattgactgcccgtagcggacgtgctgcattgaagaaccgcctgaatatcttgggtgttaatttggaacaggataagctggataaggtttacgaagaattcctgaaactggctgataagaagaaagatatcaacgacgatgatatactggtattggcaggtgccgaccgcagtgtgaatcatcgcatcaagttggattatttgcaggtgacaagtggtgtcggtgtacgttcggtagccagtctcggattgaatatctcaggtgagaagtttgaagcttgtgccagtggtaatggtccggtggacgctgctatcaaagcattgaagaagattgttgaccgccacatgacactgaaagaatttactattcaggctatcagcaagggaagtgatgacgtaggtaaagttcacatgcaggtggaatacgataaccagatatattatggtttcggagctaatacggatattatcgccgcttcggtagaagcctatattgactgtatcaacaagttcaaatcataagatagagactgaggtcatatctcagcattacagggattgactaaatttgtaaatagtaattagtaaaatagtaaatagacagatgaatacattatttgataagatatgggacgcccatgtggtgactaccgtggaagacggcccgacacagctttatatagatcggttatattgccatgaagtgaccagtccccaggcttttgcaggactgcgtgaacgtgggatcaaagtgttgcgtccggaaaaggtattctgtatgcccgaccataatacaccgacacatgatcaggacaagccgattgaagatccggtttccaagacacaggtcgatacacttacgaaaaatgccaaggatttcggattgacgcactttggcatgatgcatccaaagaatggtattattcacgtagtaggtcccgaacgtggcttgactttgccgggaatgacaatcgtgtgcggtgattcacacacttctactcacggtgctatgggagcaatcgctttcggtatcggaaccagtgaggtggaaatggtgctagcatcgcaatgtattctccagtcgcggccgaaaacaatgcgtatcacagtggacggtgaactgggcaaaggagtgactgcaaaagatgtggcgctttatatgatgtctaagatgactacaagcggtgctaccggatactttgtagaatatgccggctcggctatccgtaatctgactatggaaggacgccttactctctgtaacctttctatcgaaatgggtgcacgtggtggtatggtggctccggacgaagtgacttttgaatatatcaaggggcgtgaaagtgctccgcaaggggaggcgtgggacaaagctttggaatattggaagacgttgaagagcgatgatgatgccgtatttgacaaagaagtgcgtttcgatgcagctgatattgaaccgatgattacctacggaacgaatccgggaatggggatggggatcacccggcatattcctactactgaaggaatgagtgaaacagcacaggtttctttcaagaagtcactggattatatgggctttcaaccgggcgaatctttgttgggcaagaagattgattatgtgttcctcggtgcttgtacaaacggccgtatcgaagatttccgtgcgtttgcctctattgtgaaaggacgtaagaaagcggaaaacgtgatagcatggctggttccgggttcatggatggtagatgcgcagattcggaaggaaggaatagacaagatattgacggaagccggttttgcaatccgccaaccgggatgttctgcttgtctggcgatgaatgatgataagattcctgccggaaaatattccgtatctaccagtaaccgtaactttgaagggcgtcagggacccggtgcacgcactttgcttgccagtccgctggtagctgctgccgcagcggtgacaggggtgattaccgatccgagagaattaatgtaattgacaatcgagaaattgcaaatcttaaaatagtagacaaagatggctaagacaaaatttaatataataacaagtacttgtgtacctctccctttagaaaatgtagatactgaccagattattccggcccgtttcctgaaagcaacgactcgtgaagaaaagttcttcggcgataatctgtttcgtgactggcgttataatgccgacggttcactgaatgaagaatttgtgctgaacaatcctacttatgggggacaggtgttggtggcagggaagaacttcggttccggttcgagccgcgagcatgctgcctgggctattgcgggttatggtttccgggtggtagtctccagtttctttgcagatattcacaagaataacgagttgaataacttcgtgcttccggtagtcgttacagaaggatttcttcaggaattgttcgactctatctatgctgacccgaaaatggaagtggaggtgaatcttcccgaacagaccattactaacaaggctacaggcaagagtgaacattttgaaatcaacgcttataagaaactttgtctgatgaacggactggatgatatagatttcttgctaagcaataaaaataaaatcgaagaatgggaaaacaaggcgtcaaaatagagatcatggacacaacgctccgtgacggtgaacagaccagcggagtatcttttgtgcctcatgaaaaactaatgattgcccgtttgctgttggaggatttaaaagtagaccgggtagaggttgcttcggcgcgtgtgtcggacggtgagtttgaagccgtgaagatgatctgcgactgggcagcccgccgcaatctgcttcataaagtggaagtgctgggatttgtagacggccatacttcggtggactggatacagcataccggttgccgcgtcatcaacctgctttgcaaaggttcgctgaaacactgtacgcagcaattgaagaaaagtcccgaagaacatattgaggatatcatcaatgtggtgcgctatgccgatgaacaggatattgctgtcaatgtctatctggaggattggagcaacggaatgaaggactctcccgaatatgtatttcaactcatggagggattgaagcataccagtatcaaacgttatatgctgcctgacactttgggtatcctgaatccgttgcaagtaattgaatatatgcggaagatgaagaagcattatccgaatatgcacttcgatttccatgcccacaatgactatgatctggcggtgagcaatgtgctggctgccgtgttgagcggtgccaaaggattgcacacaacgatcaacggactaggcgaacgcgcgggtaatgctcctctttcaagtgtgcaggctattctgaaagaccacttcaatgcagtgaccaatattgatgagagccgcctgaatgatgtcagtcgggtggtagaatcatattcgggtattgtcattcctgccaataagccgattgtgggggagaatgtctttacgcaggttgccggagttcatgctgacggtgataataagaataacctgtattgcaatgacctgttgcccgaacggttcggaagaaagcgggagtatgcgttaggaaagaccagcggcaaggcgaacatccgtaagaatctggaggacctcggtctggaactggacgaggactctatgcgtaaggtgacggagcgtatcatcgaattgggggataagaaagaattggtgacccaggaagatttgccgtatatcgtttccgatgtgttgaagcatggtgcgataggtgagaaggtcagactgaaaagttactttgtcaatctggctcatggcttgaaaccaatggcgacgctgaaaatagaaatcaatggcaaggagtacgaggaaagttcgagcggtgacggtcagtatgatgcatttgtgcgtgctttgcgtaagatatataaggtgacactgggacgtaaattcccgatgctgaccaattatacggtaacaattcctccgggcggacgcacggacgcttttgtacagacagtaatcatgtggagttatgaggactgtgctttccgtacgcgcggactggatgcggaccagaccgaggctgccattaaggcaaccgtgaaaatgctgaatatcattgaagatgaatatgagaaagagtagctgagaatcagcttgtccgaagaatgttttataagtatatataaatagaagaattaacgattatggattttaaaattgctgtattagcaggcgacggtatcggaccggagatctctgtgcaaggtgtagaggtgatgagtgccgtttgcgagaagtttggtcacaaagtaagttacgaatatgcaatctgtggcgcgaatgccattgacgaggtaggagatccgtttccggaagaaacatatcaggcttgtaagaacgcggatgcagtcttgttctctgctgtcggcgacccgaagtttgacaatgatcctactgccaaagtccgtccggaacagggattactggcaatgcgtaagaagttgggacttttcgctaacatccgtcccgtacagacattcaaatgcttgattcacaaatcaccgttgcgtgcggaactggtagaaaatgcagatttcatctgtatccgcgaactgaccggaggtatgtacttcggcgagaaatatcaggataacgacaaggcctatgacactaactattatacccgtccggaaatcgaacgtatcctgaaagtagctttcgaatatgcaatgaagcgcagaaaacacttgaccgtggtagataaggcgaatgtccttgcttcttcccgcctgtggcgtcagattgcacaggaaatggcccctcagtatccggaagtgacgactgattatatgtttgtggataatgctgcgatgaagatgattcaggagccggctttctttgacgtaatggtaacggaaaatacattcggtgatattctgaccgatgaaggttctgtaatcagtggttctatgggattacttccgtcggcctctacaggggaaagtactccggtgttcgaaccgattcacggttcatggccgcaggctaaagggctgaatattgctaatccgttggcacagattctttccgtagctatgttgttcgagtatttcgaccttaaagaagaaggagcgttgattcgtaaagcagtagacgcttctctggacgagaatgtacgtacacctgaaatccaagttgccggtggtgccaaatacggaaccaaagaagtgggacaatggattgtagattacattagaaaagcttgataaaaagaataattgtatcaggcgctaatatccctttatcgggtaaccccttcatataagaaagcctgacaacttttcccggttgtcaggcttttctttatatatttcggattgttttttgtttctaccagcttttgattgtagagtaaataatgatgccgagtactgtcaggaagcctacatacatagtgaccgatgtttgtctgatagtatttcttcttacacgggaaggcttttgcaggtaagaagctattttatgggcaatcgtacagaacagccagccgccgaaccctccgatgatgcctcctacaattaagtctccggggtaatgtacgcccaagtatatgcgcgtgtaacaattgagaactgcccaggttatgatgaaaacacttaaccagcgtttacggaacaggaatactacatacatggcaaggccgaaagagttggcggcatgacaggaaggaaaaccgtaacttcctccgcgatagccgtttacgatatgcaccaggtctacaatcggattttccggattggcaggacgcagacgtgccacgaccggacggatgatactgctgcacatctggtcggcaaaggttatggtaagcgcgatcgcagccacatagcacaggactaccttccaatggaaattgattagcaatatgtataatatggtagcgtacatcggtacccatataattttccccgtgaaagcactcataaaatagtcccaaaagggggaatgtatgccgttgaagaacaggaagacattggtgtccacttccgaaaggaaattgataatttcggtatttatcatcagtctttattgttatatttttgaatgttgcaaatatacaataaagaagaagatattgttctataccgcttaataaataatctgtatttctgttattctaacgtttggccaggtcgtcatagagcttttgcaagaaagcttttcccttttccaaatttgctcctttctccgttccttcgtcaagttgtacggtgttggcatccaaattatataccaattgattttcgggagtcaccataccgaagtagttcgggcgggtgaaatatccgaaatgaggagatgacggattcaggatatccttgctgaaagtaaattcatcgtgtggcagtcccagttgtgaaagcagggtggcggcaatgtcaatctgcgaggcataagtatctatcacatgcggttcctttatcgcgcctccaattaaaataagagggattgtttgtccgtccagtggattctcgatcggatatggataggctccttgatgatcgggaacgagtacaaatactgtatttttccactgtgggagttcctggtattgtttgatgaagtcgcctacgcaactgtcggcataagcgaatgcattgagaaccttgtcatccagccggtgaaacggaacttcaaaaggttcgtggctgcttgaagtctggacaagtttcaggaacggttcctgttgcttttcctctttcatgtctttcagcagacgctggaataatacgtggtcttgtgccccccacttgccggtacgttcggacaaagggaaatccttgtcgcaaataatctttccgataccggaagataccaggtaagagcgcatattcgtaaagtccgcatctccgccgtaataatattcaaggttgtatccggcgtttttcaagctgcgcgggatcgaaggaagtttgtccgtcttttcgggatatttcataatgctggtgctcggctgtccgggatatccgctgatgatagacgccagaccacggtcggtacggaagctgttggcatagaagttactgaataagataccttctttggcaaatttatccatattgacagctacattcggctgcccaccgaaagtttccatcaggtgtgtggagaaactttcaagaatgataaagacgatattcgggcgttgggtattcaggagttgcgggatactgtcggccggtgtggcgggtttgtccaccatttccgcaaatagcttgtcggctgtgttagggtccatgaaacgatactgcttctcgaagttattctgatgcgtagcagagtacatgaaactgaatgccggattaatggcggcatggttcatcagttggtcggagctgaaatatactttgcttaagttcatggtcgatacggtgaaaccgccgcggatagggatgaaaagcgctgccgtcagtaataataatgcgagggagacattttgccggcgataaggtatcttcatggggttcttctcgcggatcagtacgtagtagaaaatgcagtataaaataccggcgtaaatcagcatggctactatccccagcagtacgaaccaaaagctgacacttgccatggcgtccttgggagaggagaagaaatagaaaatcggagtggcgtccaggcggaatccccaaaagccgtacaatcccaggtcgacgataaagatgcaagccatgatgaaagcaatcagtccgaagtagacttggcggatacggcggagcacggatgaatcggtccaggcggaggcgatgagcagcaggcccggaatagcggtcagatatcccgccagtgataaatccaagggaagtccgtgccacatgacccggaaatagtctccgagagacgcgttgatatataattcacggtaataaaccatgaagataggtttctgaagtgcaaataagaggacaaacaaaaaataagtcgtgagaaattgtatgattctctttttcatatctgtaaacttaaaaagattgaacggatacaaagttactatacttttccttatctttctcatgatgtgatataaaacatacctttttttctctatctttgtcgtacaagtgacataaaatgtaataaaatggcaaagatagtaaagaaactaaccgatctggtaggtaatactcctctaatggaactttccggttattgcgggaaatatggtatggaacaaaatattatcgccaagctggaagcattcaatccggcagggagtgtgaaggaccgggtggctctttcgatgattgaagacgccgaagctcgcggagttctgaaacccggtgcgacgattatcgaacccacaagtggaaataccggtgtcgggctggcaatggtgtctactataaaaggttatcatctcatattgactatgcccgaaacgatgagcctggaacggaggaatctgttgaaggcactcggtgcacaaatcgtattgacggacggactgggaggcatggcagcgtctatcgctaaagcggaggaactgcgtgacagtattcccggttcggtgattttacagcaattcgagaatccggccaatgccgccgttcacgaacggacgacaggcgaggaaatatggaaagatacggacggcgaagtcgcggcttttgtggcgggagttggtacgggaggaacgatttgcggtgtagcccgtgcattgaagaagcataatccgaaaattcatattgtagccgtggaaccggcagcatctccggttctggaaggaggagaggcggctccgcatcgtattcaggggattggtgccaattttattccgaaactttatgatgcgtctgtggtggacgaagtaataagcgtgcccgatgatgaagcgattcgtgcgggacgtgaattggcggcaaccgaaggtttgctcgccgggatttcttcgggagcggcagtatatgcggcccgtttgttggcgggacgtcccgaattcaagaacaaaaaaatcgtagcgttgttacctgacacgggagagcgttatttgtcaacagagttgttcgcatttgatgcgtatccgttggactaagttattcattaaacctgaaccgtatggtaagaattattatagcgttgctgttctgctttccggttgcgttgagtgcgcaaacctatcagcagttgtccgagaaagcgatagagtgtattgagaaggacagttttcaccgggcggaagaactgttgctccaggcattgaaactggaaccgaagaatgcgaaaaatgcgttgctcttttccaatctgggcttggtgcagcgtcgtctgggcgagtatgacaaggcactcgaatcctattcttttgcattgaacttcgctccgttggcagtcccgattctgctcgaccgtgccgctatctacatggaaacggggcggacggaccgtgcttataccgactattgccgagtgcttgatgaagacaagcagaataaagaggctttgctgatgcgtgcctatatctacatcctccgtagagattatcctgctgcacggattgattataaccgtttgctggaacttgacccgcagagttacagcggccgcctcggactggctactctggaacagaaagaggagaaattccgtgagtcgctcgacatcctgaataagatgatcgtagagactccggaggacgctacgctctacgttgcccgcgccgatgtggaacgggaaatgaagcatgaagacctggcactggtcgatttggaagaagctattcgcctgaatgcttctttggctgacgcatatttgttgcgcggtaacatttacctgatgcagaaaaagaaagcgctggcgaaagccgattttgagaaagctatttctttgggcgtaccgcctgccgatctgcacgaacaacttcagcaatgtaagtaatgtgcagtttatgccaaatgccttttgaaagtaaacggatgaaaataatgccttaaaaacttgactttggcttttggatatagtatctttgtataagtaataataagatatcatttgattttaattgagatagaataggggggcgattgcctccctatttttgtatctgcccgtttctactctgccggatagagcctctgtttctccttatcagagcctctattttatagaaacggaggctctgtttaccggaaatagaggctctgtttaaaccgttcacaaggcacctcattaccttttacccctaggcagaccgttgctcgtcttccttcttatgcctatacaccccggagatgagggggagaacagatgagaggagctgattccttcactgtcctttcgtttcctccccttccttgttaataatatgtaaacttgctcttgacaagaaatggatttttttcaacggattgtcagacgaactgccgaatcagatttacgaagtcctttccgtattttttctttttgtattcaccgataccactgatcgaaccgaattcttcaatggtggtggggcgggaaatacaaagcaaatgtaatactttgtctgacagaacaatgtaagcgggaagtgcttcctggtcggcaagctgctttcttaatccgcgcaacgcttcaaacagatcttcgctttctgtccccggcaaaccgagtggtagttcttttgtaaccactatttttttctttttccctttgcttgttgaaacttcttcacgatgaatgacgacgagcatggcttttgttcttccgaataaaatatcgcttccgcttggcgtaattttgagatgattgttctcattatacgcaatttcgaaataaccgagttgcagcatttgaagcaggtaatcctgccagtcgcgtggtggaatctcccgtccggcaccgaaagtctttagttcctgatacccttttccggtcacttccgccgaataacttccacgaagaatgtcaatcaatacgcctgtaccgatctgctgttcagtgcgtgcaatggcgctcaatgccttttgtacaatgacagtcccgtcgaaccgttgcggagggttcttgcagacgtcacaattaccgcagtcctccgtcgccgtttcaccgaaatagctcaataagattcttctccggcagatatcggcttctgcgtactgttgcatccgttggagcttttccaggttaatgctttgctggttgctttccgtggcaaacttggtcagtaggatcaggtcgcccagcgaatagaacagaaccgtgtcgctcggcaacccatcacgtccggcacgcccgatctcctgataaaaactttcgatacttttgggcagattataatgaatgacccaacgcacatttgatttgtcgattcccataccaaaagcaatcgtggcgcataccacctgaatgcggtcgttgataaaatcatcctgtgtctcgtcccgtttctgtgcggacaatccggcatgatagactccgcaccggattccctgcttttgcaacatctgcgccacagtctccgttttgctccggctcatacagtaaataatcccgctttctccgctgtgtcggttgataaactccagaatcgccttgttcttttcttttgcctgaaagcctcgtttgacagtcaggctgatgttcggccggtcgaaagaagaaataaaggtacgggggtgaaccagatgcagttggcggacaatgtcttcgcgggtgattttatccgcagtagcggttaatgcaacgatcggtacttgcgggaattgttggtggagcattcccatttgcgtatattccggacggaagtcgtgtccccattgggaaatgcaatgagcctcgtcaatagcgaacagtgagatatgcatatcccgcaggagatagtctttttctgccagcaacttttccggtgatatataaagcagtttcaggcggccttcgatacaggcgcggcgcaggttggcgttttccgtttcatcgttgctgctgttcagcgctccggcggcaatgccgttggcctgcaatgcttccacctggtccttcatcagtgaaatgaggggagaaaccacgacagccgtgccttcgcaaagcagtgccggcagttggtaacagatggactttcctccgccggtgggcattaataccagtgcatcctgcctgctcataatatgacggataatttcttcttgcaagggacggaaactatcgtaaccgaaatatgtttttagagtttctctcattgacgattatttaaatttgctgcaaaggtacgtttttctttcacaacttgcgttatgtatagatttcagtttctaagatgaattatataaaggttaaagtttcttattaatcaaaccaaatctctctttttcaaggtttttgattgtttatttagaaaaaaaatgcacaaaataattgtgtgtttaaaaaaaaagtaagacatttgtaacatctaaggttgcaaatgagcaattattaacaaaaagaacaaaccctaaccagttaattcaatgagtgatttagagaacaaaaaaacggaggaaactcctaaaaaacgtccctacaatttgagggaaaagaaagaaaagaaggctgcttacaggtctttaatcagaccggaattggcagatgagttgtatgacaagatattgaatatcattgttgtacagaaaaagtacaaggatcctgactattcagcaaaggatttggcgaaagaattgaaaacgaatactcgttatctttctgcagtagttaactctcgctttggcatgaactattcttgtctgttaaatgaatacagagtaaaagatgctttgcatttattgacggataaacgttatgccgacaaaaatgtggaagaaattagcgctatggttggctttgcaaatcgtcaatctttttacgctgcattttacaaaaacataggtgagactcctaacggttatcgcaaaagacatttggaagataaaaagtaattgcgctttccgaaactgaccaaaaggaattacctctgaatgaaagattttggagataattccttttctcattttaatgaatcaatatcagcattatgaaaaaacatcttatttcaatggcggtgaccgctgcgcttttatcatcgtgcggaggagccaaaacaacaactgctgaggcagataaatttgattatacagtggaacaatttgcagacttacagatattacgttataaggttcccggatttgaggaactgacgctgaaacaaaaagaactgatttactacctgacagaggctgctctggaaggacgggacatcttattcgatcaaaatggaaagtataatttgagaatccgcaggatgctcgaagcagtatatacgaactatcagggagataaaactactcccgacttcaagaatatggaagtttacctcaaaagggtatggttctccaatggtattcaccaccactacggtacagagaaatttgtgcccaacttctcgcaggattttctgaaacaggccgtgcttggcattgacgcccaattgcttccgttatcagacggacagactgccgaacaactttgcgctgaactgttccccgtgattttcgacccggctatcatgccgaagcgggtgaatcaggctgacggtgaagaccttgtgctgacctccgcctgcaactactacgacggagtgacgcagaaggaagccgaagacttctacaatgcaatgaaagacccgaaggacgagactccggtgtcgtatggcttgaacagtcgtctggtgaaagagaatggaaagttggaggaaaaggtatggaaagtaggcggactttatacgcaggcgattgagaagattgtctactggttgaagaaagcggaaactgttgctgagaatgaggcgcagaaagcggttatcagcaagttgatccggttctatgaaacgggtaacttgaaggactttgacgagtatgcaattctttgggtgaaggaccttgattcgcggattgactttgtgaacgggtttaccgaaagttatggcgacccgctgggcatgaaagccagttgggaatcgttggttaatttcaaggatatcgaatctactcaccgcacggaaattatcagcagtaatgcccagtggtttgaagaccattctccggtggacaaagctttcaagaaagatgaagtgaaaggtgtatcggctaaagtaatcactgccgctatccttgccggtgatctttatccggcgacagcgattggtatcaaccttccgaatgctaactggattcgtgcgcatcacggatctaaatccgtgactatcggaaatattaccgatgcttataacaaagctgctcatggcaatggattcaacgaagaatttgtatacagcgacgcggaaataaaactgattgatacttatgccgatctgacggacgagcttcatacggatttgcacgaatgccttggacacggttccggcaaattgcttccgggagtggaccctgatgctttgaaggcttatggttctacgatcgaagaagcccgtgccgatttgttcggactttattatgtagccgacccgaaactggtggaactgaaactcctttcttctcccgatgcttataaggctcaatattatacttatttaatgaacgggttaatgacacagttggtacgcatcgaaccgggaaatactgttgaggaggctcatatgcgtaaccgtcagttgattgcccgttgggtgtttgagaaaggtgctgccgataaagtggtcgaaatggtgaagaaagacggaaagacgtatgtcgtaatcaatgactaccagaaagtgcgtgaacttttcggcgaactgctggctgaaatccaacgtatcaagtcgaccggtgactttgagggtgcgcgtgcattggtagaaaattatgctgtgaaagtagatccggttcttcacgctgaagtattggaacgttacaagaaactgaatctggctccttacaaaggttttgtgaatccgaaatacgaactggtgacggatgataatggaaatattacggatgtcactgtggattatagtgaaggttatgtagagcaaatgttgcgttacagcaaggattactctccattgccttcggtaaacaactaatcggaatatggatattaaagaacaattaaaagatatcaaaacacagctccgtctctctatgaacggggctgtgtcccaaagtatgcgtgagaaagggctgctctacaaactcaatttcggtgtagaactgccccgtatcaagatgattgccgaaggctatgagaagaatcatgacctggcgcaagccttgtggaaagaaaatattcgcgagtgtaagatcatggctgccatgcttcaaccgattgataccttttatccggagattgcggacatctgggtagaggatattcaaaatatcgaaatagccgagttgacttgcatgaatctttttcagcatttgccgtatgcccctgccaaatctcttcactggattgcggatgaacaggaatatgtgcaaacctgtggtttcctgactgccgcccgtctcctgatgaagaaaggtgatatgacggaacgggcctcaggcgaattgctcgaccaggcaatctgtgcagttcattccgagagttatcacgtgcgtaatgcggcgttgctggtgatccgcaagtatatgcagcataacgaggaacacgcttttcaggtgtgccggttggtagaaggaatggccgattctgaggtagaagcggaacagatactttataatatggtgaaagaagaggctgcagatttataatataataagactatgattgtataaggtgatagggggacggacttgaccataactttatcaccttattatttaataacagataacattgtattttcttttagaggaatttcttttgctttccgcaaaaaaggcttaactttgttcgcgctaattttggctgataatggaaactcaaaatgtgaaagatacagtaaggcagatatttacggaatatctcacggcgaacgggcatcgtaagactcctgaacgctacgccatactcgatactatctattctattgacggccatttcgatatagatatgctctattcgcggatgatggaccaggagaatttccgggtgagccgggcgactctctacaatactattatccttcttatcaatgcgcggctggttatcaagcaccagttcggcacttcctcccaatacgaaaaatcatataatcgcgagacacatcatcaccagatatgtactcagtgcggtaaagtgaccgagtttcagaacgaggagttgcagcatgccattgaaaatacaaaattaagccgctttcaactttcgcattactccttatatatatatggtatatgcagcaagtgcgacagagctaacaaacggaaaaaagtaaataacaacaataaaaaagaaaaatgaaagtagatgttctattaggattacaatggggcgacgaaggtaaaggaaaagtagtcgacgtattaacacctaagtacgatgtggttgctcgtttccagggcggcccgaatgccggtcacacacttgagtttgaaggacagaagtatgtgcttcgttctatcccttccggtatttttcagggaaacaaggtaaacatcatcggtaatggtgtggtacttgacccggcactgtttaaggcagaagcagaagcgcttgaagcatcagggcatccgctgaaagaacgtttgcacatctcaaagaaagcgcatctcattcttccgacacaccgtatcctggacgctgcttacgaagctgccaaaggagatgccaaagtgggaactaccggtaaggggatcggtcctacatatacggataaagtaagccgtaacggtgtccgtgtaggtgatatccttcataatttcgatcagaaatacgctgctgcaaaggctcgtcacgaacaaatcctgaaaagcctgaactacgaatatgatcttgctgaactggaaaaggcatggttggaaggtatcgaatatctgaaacagttccattttgtagatagcgaacatgaagtaaacaatctgttgaaggacggaaagagtgttctttgtgaaggtgcacaaggtactatgcttgatatcgacttcggttcgtatccgtttgttacttcttccaatacagtttgtgccggtgcctgcaccggattgggcgtagctcccaaccgtatcggagaagtttacggtatcttcaaagcatattgtactcgcgtaggagcaggtcctttcccgactgaactgtttgatgaaacaggagacaagatgtgtacgctgggacatgagttcggttcggttacaggtcgtaagcgtcgttgcggttggattgacctcgttgcgttgaaatattccgttatgataaacggggttaccaaattgattatgatgaagagcgatgtgctcgatactttcgaaacaatcaaggcttgtgttgcttacaaagttaacggtgaggaaattgattacttcccatacgacatcactgaaggggtggaacctgtatatgcagaacttccgggctggcagacggacatgacgaagatgcagagcgaagatgaattccccgaagaattcaacgcatatctgactttcctcgaagaacaacttggcgtacaaatcaagattgtatccgtaggaccggacagagcgcagactatcgaacgttatacggaagaataacatttgttctattatattttgggaaggcggagattggacaaactccgcctttcttgttcaaatctttgttgcttagtatggacacaaataataaatgccttatgaaaacacgttttatttcttttcttttattactcgccatgagttgtggggcttttgcccagtcttcctatcagccgacagaagaaaacttgaaagcacgggaagagtttcaggataataagtttggtattttccttcattggggactgtatgcaatgcttgctaccggtgaatggactatgacaaacataaatctgaattataaagagtatgccaaactggcaggtggattttatccatccaagtttgatgcggataagtgggtgcagtctatcaaggcttcgggagccagatatatctgtttcacgacccgtcaccacgagggtttctcgatgtttgataccaaatattcggattataatgtggtgaaagctactcctttcaaaagagacattgtgaaggagcttgctgctgcctgtgccaaacatggaatcaaacttcatttctactattcgcatctcgactgggtgcgtgaagactatccctggggacgaacagggcgtggaacggggcggccggattcaaaaggaaactggaaaagctattatcaatttatgaataaccagttgacggaattgcttacaaactacggtcccgtaggtgctatctggttcgacggctggtgggatcaggatcagaataaagactttgattgggaattgcccgaacagtatgctttgattcataagctccaaccggggtgtctggtcggaaataatcatcatcagacgccttttgccggtgaggatattcaaatcttcgaacgtgacctgccgggtgagaatacggcagggctctccggacaggatgtaagtcacctgccgctggaaacttgtgaaacgatgaatgggatgtgggggtataagattaccgaccagaactataagtctaccaaaacattgattcattatctggtgaaggctgccggcaagaatgccaatcttctgatgaacatcggtcctcaacctgacggagaacttcctgcagtggcagtacaacgtttgcaagagatgggcgagtggatgaaacaatacggagagacaatctatggaacacgtggcggtgtggttgcgcctcacgattggggagtgactacacagaaagggaacaaactctatgtgcatattctggatttgaaagataaagcattattcctgcctttgacagataagaaagtgaagaaggcggttgtatttaaagatcagtctccggttcgccttaccaaaacgaaagcgggcgttctgctggaatttgcggaagtcccgaaagatattgactatgtggtagaacttacgattgactaatttttagctaattcttcataaaagcacggggaaactattctgacattgatagtttccccgtatttttggcaaacaatttgtttatagatatagagtaataattaaaacgaaaagtatatgatgtcttattgggtattatttattggaattgccgtagtaagttggctggtgcagatgaatttgcagaacaaattcaagaagtactccaagatccctaccggcaatggcatgacaggacgcgacgtggctttgaagatgttgcatgacaatggaatttatgatgtacaagtaacacatactccgggacgattgaccgaccactacaatcctgcaaataaaacagtgaatttgagtgaaggtgtgtatgaaagtaacagtatcatggcggctgccgtagctgcacacgaatgtgggcacgctgttcagcacgcacgtatgtatgcgccgttgaaaatgcgtagcgcattggtcccggtagtgagctttgcgtcttctatcatgacatgggtgttgttgggaggtattttattgctgaatacattccctcagttattgttggcaggtattatattgtttgccatgactacattgttcagctttatcaccttgccggtggaaatcaatgcaagtaagcgtgcactcgtttggctgagttcatccgggatcaccaactcgtataatcacagacaagctgaagatgcacttcgttccgctgcatacacttatgtagtagctgcgttgggttcattggctacgttgatttactacattatgatcttcatgggtagaagagactaaaaacttctccataaaatataaaagagtgccttcttagtccgcattaggattctggaaggcactcttttgtttgtcatacgttatcatatattcgggttttgcacaacttagggtagaatgttgacgattttttcagatatatgcaagtgttgctcggaaatttgcagtaaatttgcgcaattaaaattataaacagtaatattatggcagcaaaaccaagtattcctaaaggaactcgtgacttctcgccggtagaaatggcgaagcgtaattatatatttaatacgattcgtgacgtatatcatctttatggtttccagcagatagaaactccatctatggaaatgctttctacactcatgggaaagtatggagatgaaggcgacaaacttctttttaagattcagaactcgggagattatttttccggtatcactgacgaggaattgttgagccgtaatgcagcaaagttggcaagcaaattctgtgagaaaggattgcgttatgacttgactgtaccttttgcccgttatgtagtgatgcaccgtgacgaaatcacgttccctttcaaacgctatcagattcagccggtatggcgtgccgaccgcccgcagaaagggcgttatcgtgagttttatcaatgtgatgcggatgtggtaggtagtgattcgttgctgaacgaggtagaactgatgcagattgttgatactgtattcagccgtttcggtatttgtgtatgcatcaagattaataatcgtaagattctttccggtattgccgagattatcggtgaagctgataagattgtcgatataaccgtagccatagataagctggataagatcggtctggacaacgtgaatgccgaactgaaagagaaagggatcagtgatgaggctattgccaaattgcagcctattattcttcttaacggcacgaatgcggagaaactgggtacattgaaagaagtgttgtcagccagtgaagtaggattgaagggagtggaggaaagtgagtttattctgaatacattggaaacaatggggctgaagaatgaaattgaacttgacctgacattggcccgcggattgaactactatacaggggctatttttgaagtgaaggcgttggacgtacaaatcggcagtatcacaggcggtggacgctatgacaatctgaccggagtattcggtatgtcgggggtatccggtgtcggtatctctttcggtgcagaccgtatcttcgatgtgttgaaccagctcgaactttatccgaaagaagctgtgaacggaacagaagtgttattcatcaatttcggtgaaaaggaagcggctttctctatgggtgttttggcaaaagtgcgtgcagcaggtatccgtgccgaaatcttcccggatgcctccaagatgaaaaaacaaatgagctatgccaatgcgaagaatattccgtttgtcgctatcgtaggtgaaaacgagatgaatgagggcaaagttatgctgaagaatatggagacaggagaacagaatcttctttcggcagaagaattgattgctgctgtaaagagataaaagaacattgattataaaaagataaggtgccgttgacattcgatcagcggcaccttattatttgggaatagtactcctgtttaccgggagttacaaatgacgttcgggatacatctcattccaccattccgggcgatcctgcaaccagcgtgcaaaccatgccataatagaattgtgccatttgatacgcttgtcgtaatctgaaataaaatgattctcaccgtctactgtgatgaattcaacagtctttcctaatatcttcaaggcattgaaaagctgtatactttcacctatgggtacattggtatctacggttccgtgcaacaatagcaatggagtgttgatcttgtcagcattgaataaagagccttgtttggtaaacagatccgggtttttccaggggtagctgtcggcagcggcaatcgcattgtatgaatagccccagtaaccttctccccaatagctggtcacatcgctgatacctgcatgagacacggcagcggcaaagatgtcagtttgagtttgcagatactgcgtcatgaatcctccgtaggaagcaccgagacatccgattcgtttttcgtctacaaacgggtgttccttgcagaactgttttgttccttcaataatatcgtcagcagtacgttttccccacgcgttgacgtggcgtgcagaaaattcctgtccgaaaccgatagtaccgctaggctgaatcacatacactacatagtcgcgtgaagcgaacagttgggcacaatacggattactgatgccacgtgtcgtaggagtggttccgccatagtaataaacaagcatcggatacttcttattcgggtcgaagttgggcggcagacacatctttccggtgattatcgttccgtccgaggccgtaaagttccacggttcggttttacctaattctatctggtcgagaattggcttcaatgggtcggccagtaaccgggaagtttttttcttcatgtcatacagataggcaactccggcattatggtcggattgaccgatataagcagcgattcccggattatattccgataaggtgaaagcactggtaacatccgtttccaggttcaacttctcaaaactgttgtttttgggcgagtagcgatagatgttcttgcagtcgccatcgtccgtattgaaataaatacatccgtccccgcgattccattgcagagggctgacagtcgggttgaagtctttagtaatcggctgtatcttgcgggtagccaggtccatgataaatgcctgtgtgtcgaaatcattggcaataggatgattaccgcaattctttccgattccgccgaaggcctcgggacttgctgtaagcaataactgcttgccgtccggtgaatagctggcacctcccaggaagcgttcgtcgtggaaaagagtgtcaaccttcaacgtttccagatctaccaggtagagagaagacagagagaacggacgttgagtgatgttttctttcgatgtactatatatcataaatttcccatcgggagaaatatcctgtaagtaagtgctatggttaccataagtcaaccgttcggaaacaccgttggctatgttatatttagccaggaagcttcgtccgcgagtgttgggaatacggtctgccgggctgacgatacggcggagagcaccttgttctttttctccttcttctctggggtaatagatcaggaagtcttcgttgggcgaccatgtaaagctctgttcgggaatccctttcaagagagtttcttcgttcagtgtagcagggtcgagcgtgataacgtcatttccgctaagcgctgttacggtataatagagtttgtcgcttttgggcatccaacgcataccgtctcttgcattatccaaaagaacctttccggttttcagttccgtgagctgacagtatgtacgcgagcgtttggcagcatggttgttccaataacgggtcagcaggtattttccactcggagagatcgcaacggagataacacggttgccgtacactgtattatccagtgaaaaacgcttctttgcattcggatctagtgtgcaggcgatatccttgaatttattgtccttgataaactcgcatttcagggtaggagcagctttgtcttctgcggtggaaagcaatttgattgtgatttcataatctctttccggttccagagtaagagctatatcccgagaggaggcagaactgatactatcttcggcggcgtcctttgtctgcttggaaacttcgtcgataaagacttcccagcggacgggagaagtaactttcaattttcctttcaggaaacgttccgccctgatctgtgttttaagtacataaatcttgctgtttttgtcagccttatccaatgttagataccctgccgtgtcaacggtcagtgattgcaggggcgcatcagggaggtcgagtactaccggagttttaagcaacatcttggttgaatgcttttctcctttcgggttgatactgtcgttcatgataggtgtacgaacctcaatagcgtcgcggactttgtattgtgtcactctttcctgcgcctggagagtgagtccggtcaacagaaaaatggctaaagccacttctttctttttcatgtgttgtgtattaaattaaataatatgattaattaggtagcaaatgtaaacttaatgttcttagtatacaaccaaaacagctctttttttagtattcaatccgatctaatatcccattgaggaaagcaatggctactccatagtttgtcatgggaatattttgctttcgggctaactcgatacggctgagtacatatttacggttgaacatacatgccccacagtgaatcactaaagaataaggtgtcaggtcttgtggaaagtctgttccgcccacgatgtctatttgcagtttctcaccgatacgttttctcagtaagcggggaagtttcacccgcccgatatcctcggaaagaggggcatgggtacaggcttcggctattagcacacgtgatgattcggtcagcatctcaatagcggccgcacttttcacataataatgaatatctcccttatatccggcgaaaagcacagaaaaggacgtaagtttgctctcttccggtttttgctcgtagactgttttgaaaacctgcgaatccgtaataatcaatttgggaggatgagcaagggcgtgtaatgtttccggcaacttgtcggtggtacaggtgacaatcagacatttcttgtccagcaattcacgaatcgtctgtacttgcggcaggatgagccggcctttgggagcctgtatgtcctgtggcattacgagaagtacgaggtcattctctgcgactaacgttccggtgatactttgctggccgaaatccggagggagtttttccagtatagtccggcggatctgttcgatccctgttttctcttttgcactgattaggacaggagtatctccgaaactttctctgactttgatagccaacgcctgtgaatctttccgtatatctgttttgtttatcagcagaatcgtcggaatccctttagcctttaactgttccagccagtaaagttcttctgtaaaatcgggctcctttgtctcctttgaaagctcggcagacgtatcgcctccacaaaataagatagccatatctgttttctctaccgctttccatgtgcgttcaatacgcattcgcccaagttcgccttcatcgtcgaatcccggtgtatcgataaacaagcacggtccgatcccatgaatttccatggctttcgctaccgggtcggtggttgttcctggagtatccgagacgagcgcagtgtcctgtcctgtcaaagcgttgataagagaagacttgccactgtttcgtctgccgaaaagagctatgtgaagcctgttggcgttaggggtatctgttaaactcataatcgaaaatctcttttgccttcggcgattgcttttaagttacgtatggcgatttctctgattttgggattcggaatatgttccgtttccttttcaatcagtttcagcccttttttccgggtgtcttcggaggcataatcttccagatactctttcagtgtcattaaggcattcggggcacagcagtttgctatctgtccggatttgacgagcgacatgaaacggtcgcccgttcttccttcgcggtaacaggcagtacagaagctggggatatgcccgagatcgagcagccagttgacaacctcgtccagtgtccgtgtgtcactgacatcgaactgtgcggaattgttctccggcagttctctttccgcataccctccgacactggtacgcgaaccgccgctgatttgtgaaatgcccagttcgaggaccttcttgcgtgactcctgtgattcgcgggtcgaaataatcattccggtatatggaacggctatccggataacggctacaatcttgctgaatatctcgtccgagatagcattggggaaatcccctgcatcaatatcatctgccgagcagatgcgcggaacgctgatcgtatgcggacctacgccgaatctggcttccagatgttcggcgtgcatcagcagtccggtaaagtcataacggtatgtattcagtccgaagagaacgcctacccctacatcgtcaatacccccttccatagcacggtccatggcttccgtgtggtaggcatagttgcttttcggtccggtggggtggagggcttcgtagttttctttatgataagtctcctggaacaatatataagtgccgatgcctgcctctttcaaccggcggtagttttctaccgtagtggctgcaatatttacgttcacccggcggatagccccgtttttatgtttgataccgcaaatcgtccggatagattccagaatatattctatcggattcagggtgggatgttctcctgcttcgagtgccaggcgcttgtgccccatatcctgtaaggcaatcacttcctgacggatctcttcctgtgtcagtttcttgcgggcaatcgttttgtttttggcatgatacgggcagtaggtacagccgttgacgcaatagttcgagaggtacagcggtgcaaacattacgatacggttgccgtaaaacttttgtttgatttctttggcgagatgaaagatgtgttctatcagatcgggctggtcacattccaataggacggctgcttcccgatgtgtcagtcctttacatagagcagctttttcaatcagttgttcaatcagtgcacggttgtctttgttggtccgtgcatattccagtgtttccagaatttcttcatggtggatgaattcttctgcttcaggtgaatctactttgtatgtcataatctattctaaacttctaagttccaactaactgacttctaactgtcaaccgttttaaaatctcctctggagaaagaaatctcgtagccgatgttatgtaattgttgttgcaatatcctgattccttctgccgattcagctccgagggaggctttgttattatataaggtatactttttccgttcctcctgtggcgacagattgggcatgactacatttgctcctgccaatatcccccgttcccgtccgtcgggagtcagtgtagccagagctgttgtcgatggaatcagtgccgaagggtgcatcaggcggaagatagacaataagagcagtgtctgttcgagcgttccgctggaatatcgggcaaaaggcgtatcctgatgaggcagaaaaggaccgatgccgatcatttcaggacggagtttttcgataaacagaatgtcttgaatcagatgttctacagtctgtcccggactaccgaccataattcccgttccggtttgataccctgtttcttttaagttttgcaggcattgcaggcgttgcttgccggacattccggcagggtgcagttggctgtaatgcgtcgcgtcgtaagtttcgtgccgtaacaggtagcgattggctccggcgtgaaagaaacgttcatacgcttcgcgtgacttttcgccgagtgatagcgtaatggcacagtccggataatgccaccgtatggcggcaacgattgtctctatgcggtcgtccgtcagtgcaggatcttctcccccttgcaggacaaaagtccggaatcccagtgcgtatccttgtttgcagcaatccagaatactttccggactcagccggtaacgtgctacgtgcggattacctttccggatgccgcagtaatagcagttgttccggcagcaattacttatttcaatcagtccacggatataaatccggtttccgaaatgccggaggctgacctcccgtgcctgttcgttaatgattcgcagggagtccgcgtcacatccggtcaacagttgccggaattcttcgggtcgaagagttctttcctgccgtagtttatctatccattgtttcatagctctcttttcgtttgagcagctcttgtgccagttggcgacgtcccgaaacaatgtcattgtgcgtgctcggtccggtgatacaaccaccttcgcaagccatgacttcaataaattgtccggctgcctttccggtcttggcacaggcacgcagcagggctatgttcttcttattgatatccgacacttggatcgcgtttatcttttccgcttcttctttcaggtatgctttgacagctcccattacaccgccggcttgtgcgaaaccgtgtgcttcgcggacggaagtatgcaatatggagaaagcctgtgtctgctccagttggatgtccaacccgtcaagaatggaacccacctcttcgaatgtcaggatataatctacggcctcgtcgcggcgcacctctttacgtttggctacacatggacctacgaatacgatttttgcatccgggtgcttctccttggcgatccgtgccgtgtaatacatcggcgaaccggtggtggaaacgtatggtttcatccccggaatatgtttttctaccagttcgatgtaagaagggcagcaggaagtagtcatgaaactttgtcctttttccaacttctccagtaactcgtgtgcttcgttgctggtagtcgacattgctccttcggccacttcaatcacatcggtaaatcctatttctttaaaagctccatatacttgttcgatcgaagtcttgaactgcccgaggatagacggagcaataatagccaccattttctctcctttacggattcgttgcaaaacgtcgaatgtctgtgaaatctcgaagatagcaccgaacggacaagcattcatgcactttccgcaatatatacatttgctttcgtcgatatgctctattccgtgttcatctttactgatagctttcaccggacaggattcttcgcaaggcacaggaatatagacgatggcatgatacgggcaactcttatgacagataccgcaactgatacacgtctcatggtcgatcattgcctgaccgtttttcttgaaacgtatggcatctttggggcagttcatatagcaactacgggccacacatccgcgacaaaggttggttatttcataattaatctgtatgcaggaagaacacgcttcgtcaatgacgcacattatattttctttatccggttcgggacggctcaatgcttgctgcgcatattcggagagaggagttacttcgtcatgttcgtctgtcatgtccagtcccattagggggaacatcttgtatctccacacggctcgttctttgtgtacacaacagcgtcccagaggctttgacttgcgtgggctcaattcaataggtagccggtctattttttctactaactggtcgtttttccagagtcttacaaggtcagccagcaacttgtgccggacaatcataatgttattcgtaaatgccatattgtaattaaggggttgttagcggatgcaaagatacgaacactatttcaatatttaagctttttgaaacattcttgtaaattttttgtagcctttctgcgttatctttgcagtaggtaaaattaagaggaggaagaggtatgaatagcagcattttagaacaaagaaaccgtttcgctttgattggtgtactaatgactattgtcagcctgatgtttttattctatatgggaagttctttggtcagttcgactaagaaatatctggaacagatccggatgatagagataacttgtgtggacgaataaaagagaaagctgtaaagcaggatatccggaggaaatcattacttttgccggaagaaaacaagaaaccttatggaagagaaaaacaaagcatggaaaacggtgagcagcaaatacctgttccgccgcccgtggctgaccgttcgttgtgaagatatgttgcttcccaatggaaatcatatccccgaatattatattcttgaataccccgactgggtaaacacgattgccataaccaaagaaggaaaatttgtatttgtctgccaataccgtcccggcatcggtcggacttgttatgaactttgtgccggtgtgtgtgaaaaggaagacgcttcgccattggtatccgcccaacgcgaattatgggaagaaaccggctacggaaatggcaactggcaggaatatatggtgatttccgccaatccgagcactcacaccaatctgacgtattgcttccttgcaaccgatgtggaactcatcgaccaccaacatctggaagctaccgaagatctttccgtgcatctgctcaccttggaagaggtgaaacggctgctggataacaacgaaatcatgcaagcgctgaacgctgctccgctatggaagtatatagctagtttatagctttcgcatacatacattcccttcacacataatcaggaggtttgggctgcaaagttcagacctccttgtttgttttcctggagacatatagataagtctcacttcatcctttgcaaacttcctctatatagagcgtaaagttgctcttgctttatcataatctataaacgaaacttccgtttataaaaacgcaagtttcgtttatataatcaaagccttcatttataaaaacgcaacttccgttttaagtctgaaacggggcggaaagaactttgtggtaaagggaagggaagtttgcgccctacggggagtaacttctttgttaatactatgaaggtagggtagtggtagctctctctttttgccataagaggtgaactgtcagtcattttgtcagtcaatttctgccaaacaatcattcttttgctttggcacgcttttcgcaatgtctttaacggttcgcctgcagaacaggcgggtgacaattaatattataatgtataactaaaatataataagtaactatgaacattaaaccattagcagacagagtgcttatcctccctgcacctgcagaagaaaaaacaattggtggtatcattattcctgatacagcaaaagaaaaacctttgaaaggtgaagttgtggcagtaggtcacggtacgaaagatgaagaaatggtattgaaagtaggcgatacagttctttatggtaaatatgctggaacagaacttgaagtcgaaggtactaaataccttatcatgcgtcagagcgatgttctcgctgttttgggttaataaatgtagtaaataatcaatcattaaattgtaaatatcattatggcaaaagaaatattattcaatattgacgcccgtgaccaattgaaaaaaggtgtcgatgctttggcaaatgcagtaaaagtaactcttggtccgaaaggacgtaacgttatcatcgaaaagaaattcggtgctccgcacatcacaaaagacggtgtgacagtagcaaaagaaatcgaactggcagacgcttaccagaatacaggtgcacaactagtgaaggaagttgcttccaagactggtgatgatgcaggtgacggtacaacaactgcaaccgttctcgctcaggctatcgtagctgaaggattgaagaacgtgactgccggtgctagcccaatggatatcaaacgtggtatcgacaaggctgttgccaaagtggtagaatcaatcaaatcgcaagcagaaacagtaggtgacaactacgacaagattgaacaagtggctaccatatctgcaaacaatgatccggtgatcggtaaattgattgctgatgcaatgcgtaaggtttctaaagacggtgttatcactatcgaagaagcaaaaggtactgacactacaatcggtgtagtagaaggtatgcagttcgaccgtggttatctgtcagcttactttgtgacaaatacagagaagatggaatgtgaaatggagaaaccttacattctgatctacgacaagaagatttctaacctgaaagatttcttgcctatcctcgaaccggctgtacagactggtcgtcctctgttggttattgcagaagatgtagatagcgaagcattgactactttggtagtaaaccgtctgcgttctcaattgaagatttgtgctgtgaaggctccgggctttggcgaccgtcgcaaagaaatgctggaagatatcgctatcctgacaggtggtgtggttatcagcgaagaaaaaggattgaaactggaacaggctactatcgaaatgttgggtactgccgataaggtaacagtttctaaagattatactacaatcgtaaacggtgccggtgcaaaagaaaacatcaaggaacgttgcgaccagatcaaagctcaaatcgttgctactaaatcagactacgaccgtgaaaaattgcaggaacgtctggctaagttgtcaggtggtgtagctgttctttacgtaggtgctgcttctgaagtagaaatgaaggaaaagaaagaccgagtagacgatgcattgcgtgcaactcgtgctgctatcgaagaaggtattatcccgggtggtggcgtagcttatatccgtgctatcgattctctcgaaggcttgacgggtgacaatgctgacgaaacaacaggtatcggtattatcaaacgtgctattgaagaaccgcttcgcgaaattgtagcaaatgccggtaaagaaggtgcggtagttgttcagaaagtacgtgaaggtaaaggcgactttgggtacaatgcccgtacggatgtttacgaaaacctacacgctgccggtgtagtagatcctgctaaggttgctcgtgtagctttggaaaatgcagcttctatcgctggtatgttcctgactaccgaatgtgtcattgtagaaaagaaggaagacaaacctgaaatgccaatgggcgctcccggaatgggaggaatgggtggaatgatgtaattccggtttcctattagagaatataaagaaagaagaaccgctttccctgataaagggaaggtggttcttttttttgtgttcccaaaacatctcattctccgatttgttcggttattggaatacttgtatatttattgtctaatttattaataaaatcgtgagatgtcaaaagtattaggatttatgaagcaagtggcccgtgggctgcaagtggagggaaactttggaactgctcatgtctatcgtagcagtctcaatgccattattgcttatcgtgggaaagatgattttgccttcaatgaggtaacttcagagtggttaaaagggttcgaagtttatcttcgtagtcgtgggtgtagctggaatacggtttctacctatcttcgtacctttcgtgccgtttacaatcgtgccgtcgatcttcatcgggcaccatacgttccgcatctgttccgttcggtgtatacgggcactcgtgccgatcataaacgtgccctatgcgacgacgatatgaagaaagtgttttgtaaattgtcgcagtcttcgggtgtatctccgaatatgcgccgtgcacaggaactgtttattcttatgttctcgctccgtggtataccgtttgttgatcttgcttatctgcgcaagagtgatttgcgtgataatgtaatcacgtatcgtcggcgtaaaacaggccgtcccctgtcggtgacgttgactccggaagcaatgattctggtaaagaaatacatgaaccgtgattcttcttctccttatctctttccatttttggaaagccgagaaggaacgaaagaggcgtatcgtgaatatcagttggcgttgcgtagctttaatcaacaactaatgttgttgggagagttattaggattgggtgataaattaagctcatacatggctaaacacaaccaattctctatctaactgaaaataaaatagttatcactcactttgtagataataggtaacactttagaaacgagcgaattacaatattctgttttattctgcatcaactcaaagaagctttttttcaggacaaaaataccaaagacgctgacaattagcaaatatctccggtaagatttgcatgttttaactccgtttttcatcttcaattaaaaagatcgaggttttcctgcatagtgtcgtggcgaaagagaccggcaatatcttctgaatgaccgacagatccctattctccaaccccaacaagtttagttgtacaatggaactaatagagaaggaggtcaataactccagaagaggatttcattctgcatttcaagaacaaatacagcaatacttatcctcttgcatggatgcttgtggacatgttgtcaatgggcatcgtaactagcatccatgaaaatataaaatccaatccattgaaaaaagattacggtgtgctatgatctatccgttcccgttttcacttcgtggctgacagtcataatccttataagaaattcctgctgtcatcatacaagggtataaaacaagcagtacgccatcaatccgatggtagtccggaggatgcaattcccttggataaacgatatgatatcactacacaggacattttatgaaatctgcatcatttagtggtttatcaacattatatcgctggacaacgatatgaaacagcatttccaaaagttactgggttaatatccgaaatattgacagcaagtcaatgaacattcccctggattggcaggatgagcctttgcggagaatataaaatccacctttcatctatatttcttttgtaaaaagaacagatgttggaagatggttgctcctgctctatacggataaggcacaagaaacttaaagtcagacttccttgaaccacagatgttgcaaccaccacagttattacaatatttttaatttcatttataaaaagacttcctgcttcttggctttattggagtcttagattccttcatttatatcttaaataattcagcttgcatatcctcccactcccaataacggtgttgttcgcaatcctgcaatttaatcttagattcaagaagttctttttcttcttcatttattttacaggagtgttccaactttcttgatgaccttattgagtgcttataaccataataaatacaattttagtaatgttacaggattatacggtggtctcccttctgattgaagtttgacatgtttaaccccaagtttatctataggcaagatatccacaaataaatcgataatccttgcccaagaatctggagcaaccaattgttcaagagttatcatttgaatttgattttctgtttcctcctactatgtagtttatagatatattgtttagtttctttccataaatatacgaagaaccaataattcaatatagcgtctaaggtttttgcacagactctcggtggaatacatttccatgatatctgctccataacgaccgtgatgttcgtgcagcattctttcgaatgcactgattacaggccgtaccaccgtacagaaaatatcatccttacttttgaagtagttatagatattgctcaaccctacctgtgcttcttgcgcaatttcacgcatggaagccttcggaaagccgttttcgaggaataccttttcggcagctttcaaaatttctttttgtatgtcatctttagagtattgcataagttttatttctcgactgcaaagtaggggagaatccgcgttttctgaaatacccattaatgatggttttttgttagatttttataaaaatcacaattattgggtattgccaaggtcgctgaaagcatgcaactttgcgcgtataatctaactataaactactatatggtgaaactaacgaatcataaaaagacaattgacagacctttaggttgtaagagatggggaataatagctattattattatttttgcaggtagcttatcttttttactgtactcttacttttcgcatgatgctgataatcctcagtgtaactgtttgctatgtatgcttaatcatgttcctgaagagggagagtacatttataaccgctatttgatatttattagttttatctggattgctgtgatctttgcggctatctttttagtgaattactgctttgtaaaaaagaacaaaaagaaatagtgttcgtttaagtacctacttattattatttttaataacacaatactcatatttgggtattgcccgcctttttaactccctctacctttgcgccaacaaaatttaagataaaagatgaaaaaattaacttgcttattcgccttaggtttcttgctttttaacaatactttacgggctaatgaacccgaaaaagtaacctcaacagaagaggtatctgaaactgcggcaaagaaagagagaataaaacaggtaacaaaagatgacgactacgaaaagttccgtttcggtggatacggagagatggtagcaaagtttatgaattacggaacgaatcgtttctatggtggggtcgataacagtgatcaccgcaataccattgcgattcctcgttttgtgttggcttttgactacaagtttaattccaagtggatactgggtgctgagatagagtttgaagcaggaggtgtaggtcttgaaactgaacttgagaattcagaaaacggtgagtatgagacagaaatggaaaagggtggagaagtcgctcttgagcagtttcacattacccgtctgatacattcggctttcaatattcgtgccggtcatttgattgtacctatgggattgaccaatgcacaccatgagcctatcaacttctttggaacatctcgtcctgagggtgaaaccacaattattccttctacctggcatgagacaggattggaattcttcggttcttttggtaaaggatatgcgcgttttgattatcaggcaatgattgttgccggcttgaatgctgatggttttggtcgcgataactgggttgctggtggtaagcagggactctttgaacaagataactttacttcacctgcttatgtagcacgtctggactataaaggggtatcggggttgcgtgcaggtgttgctttttactattgtaatgacgtgacggccaatgctgataagaattataagtatagcagtgtaggccgctcatcagtgaaaatttactctgccgatgcacagtataaaaataaatatgttaccgctcgtggtaatatcatttatggtgatttagagaattcttccaagatcagcaaggttactctttccaataactccaattattatcacggtgctatgcgtaatgtagctaagaatgccctgtgctatggcttggaggctggtcttaacctgagtgctttcttctcgcagaagaaatgtccggttatttatccttatgcccgttatgaatactacaacccgcaggaagaggcagaaggttctgctacaatggagaagcgctgtcaggtaagcaaatggacggcaggagttaactggtttgcattgccgaatctggttgtaaaggccgattatactacccgtcatattggtacgaacaaggtatttggatcgactaaatataacaatgaaaatgaatttgctatcggtatagcttatgtcggttggtttaccaagagatagttcaaataggtatttataattaatttaatgtttaagtaatatgaaaaagtttttttatttgtcggctctttcattgggcatgatgtgttccattacggcttgtagtgatgatgacactacgactatagacgctaaaaatcttgactatacggcggagaatgcaagtagttggggaaattacatgcgagtagttgcacaattgttggtgaatgatgctactgctctttatgatgactgggcggttaaatacaacgaaggtggaagttatgcagatttctttaagaatcaagatgctttgacgagtgttgagcagttgattgacggctgtgtagacattgccaatgaagtaggtactgccaaaattggtgacccttacgatcttttcatacataataatgaagaaaaggctttgtatgctgtagagtcatggtatagctggcattctcgtgaagactatcgtaacaatatctattctattcgcaatgcttattacggaacacgtacaggggctattagcgagttatctctctcaaaagcagtagccgcggtaaatgctaatcttgatactgaagtaaaaaaagcgattgatgacgcagcagcagcaatttgggctatcccgagtcctttccgcaacaatatcaatagtccggaagcagtaagtgctatggaagcttgtgccactttagagggagtactcaagggtagtttgaagagttgtatcgaaggtattgataaaacagtgttggctgaagtcgtaaaaaattatgtggatgtagttgtattacctacttactctgatttgaaagcgggaaatcaggctcttttcgatgctgttgagacattccgtacttctcccagcaatgctaacttcaaggcttgcgccacagcatggcttgctgctcgtacaccgtgggaaaccagtgaggcattcctttttggtccggttgccgacaaaggtcttgaccccaatatggatagctggccactcgatcaggatggtatcgtacagatcctgacttccggtaactattcagacttgaactgggatggtgactatgatgaagaagatgataaaattgccggtgcacaagctttgcgtggttaccacactttggaatatttgatcttcaaagatggcgaagcccgtaccattcagtaagatttttacttgttagaaatcagattttgcggaaacagtgggataatgaatattctgttgtttccgcaacatctgcgttaaaaagataaatgttagttacgtattttgcaataataattcaataacgaatgaatggcttattaaaatactcatttccaatctgtttttcgcttctggcattgtttgcctgcgaggatgatggaattgatgtggataatatagaagtacctgccggctttgccctctctgccggtactgctaccaacttcctgacttcctcttatgcttatgacaggtcggctgactggataacaggggcatacgataaacgtttcacccgtggtgacaaattgtatgatgatatccgcaccagtagtaatggaataggtggaggactgggaccggtttatgccggttattcttgtggtagctgtcaccgaaatgccggacgtacgcaacctactttgtggagcgaaggtggttccggtagctccggcttttcgtctatgttggtttatattagtcgtaagaatggagctttctttcaggattatggacgtgtgcttcatgatcaggctatttatggtgtgaagcccgagggaaaactgaaagtggaatatacctatgagactttccagttccctgatggtgagacgtatgaactctgcaaacccaattattctatttatgaatggtatgcggacagcatcaaacccgaagacctgttctgtacggtgcgtattcctctgcgccacgtaggtatgggacaaatgatggcgctcgatcccactgaaattgaagctttggctgctaaaagcaattatccggaatatggtatcagtggccgttgcaactatatctccgagagaggaatgagaagtttaggcttgtccggtaataaagcacagcatgccgacctgacagtggaacttggtttctccagcgatatgggagttacgaacagccgctatcccgaagaaatctgtgaaggacaggcacaagtaaatcaaggcagtatgatgggactttcttatgcccagttggatgtatctacggaagaaatggagaatgtagatctctacatgcagagccttagtgttccggcacgtcgcaatgtgaataatgaacaagtgatcaagggtgagcagaatttttataaggcgaagtgccatctctgccatgtaaccaccttgcacacaaaaccacgtggttctatactgctgaacggaacccgccttccttggctgggtagtcagacaattcatccatattcggacttcctgcttcatgacatgggctctgaaattatgggcgtaggactgaatgataactatgtaagcggtttggcccgtggcaacgaatggcgtacgactccgctttggggtatcggattgcaggaaactgtgaatggtcatacttacttcttgcatgatgggcgcgcccgcaactatattgaggctatcatgtggcacggtggtgaaggtgaagcatcgaagaatctcttcaaaaagatgagtaaagaagatcgtaatgctttggtcgcatttctgaaatcattataaaacaaataacgaacaataaaaccaataagtattatacaagcaattatgaagaaattaattttaatggttgtaatggctgccctttcgttggctgctatggcacagcatgaagaagatacagaaaacggtgtagtgtcacttgccggaagagagggatttacgatagaaaccaagaagggagactttgtattcaagccctatctgttggtacagacttgtgcaaatttcaattggtatgatgatgaaggcctggataaggcatacaatcaggataatgtagctaattccggtttctcaattccctatgctgtattgggcttcactggtaaagcttttggtaaagtagcctttaatctttctatcaatgcggctgccagtgggggagcattgcttcaacaagcatggttcgatgtgcaacttaaaaaacagtttgccgtgcgtgtcggtaaattcaaaacacctttctcacatgcttatctgacgacgttgggcgaaacattgttgccgcagttgccagtatcattgacttccgccatcattctgccttattccttgaatgcggtaacgcctaacatcggtaccggttttgacctcggtgttgaaattcacggattgttagctgataaatttggctatgaagtaggtttattcaatggtaccggttcttctgtaaatacagctacaaaaactctgagtgatgattggcatattccttctttactgtatgcgggacgctttacttatatgcctaaaggtgtgatgccgtccacccaaggtaatcctaaccgtttgaatgaagataagatcatgttcggtgtatcggcttcaatcaatgtggaaagtgagaatgaaagtaccaatgatacccgtgtgggagtggaatttgccatgttaaagaataaactgtatctgggcgccgaagcatactatatgaatgtgggcttcaccgatcgtcagaaaataaatgagacatacaattacctgggtggttatgtacagggcggctactttgtagctccccgtttgcaggctgccttgcgttatgacttctttaaccgtaacggtaccagcgatgacggatttctgaatatgccggctgtgggtgtgaattatttctttaagggttgtaacctgaaactccaggctatgtaccagtatattgcccgtacggggcacgatacacagctcgaccgagataatgataatttaggtctggccactcattctgcaacagtaatgctgcaatatactttctaaaaaaacaaagagagtagttatgaagaaatgtatattattctttgctgctatctggatgacactctgcttctgttcatgtgatgatggaagaatctatgagaaggagatagaggtgcagcgtggtggccgagtcctaaagttgacaggtcgtttcagtggtatcagcaattggacggatgattatagtgtcgttgtggcaggcttcaatgataaaagtgaatacgctgttataacgaaatcactgccagtcaatgtaaccgacggaacagatatcgttatgacactgggaggtatcagtgatgaagtgaaatcactcaaattgtgtgttatcagtcgtctgcgcgaatgtattgtcgaatttaagacgatggaagatgaagaactcgcagctattacagatactatattaatggatgtgggaacactggacgtgggtatgttcagttccatccagtcacaggttttcgataaaagatgtgtagcgtgccatgggcagaccggttctgcatcgggtaatttatttctgacggagggtaagagctatcatgcgttggtcaaccagccggcgcataagaatagtgatatactattggtgaagcccggcagtgcagaagagagttttctacatctggtcttgaacagggctggtgatacgagtatgaaccataccgatatgctgtcagaagatgagcaacccttattgaaactgatagataattggataaacgaaggtatttttttgaataacgagtaaacgatattggaaatgaacaacaaaaaacaaccaaccaatcaatcagagaatacattaaccgagatttttaaatatgaagtaaaagaaggcgtttcagagtttcatgtaatgattcactctacccggccggaagacacttatgaagaacaattaaatgcagtagccaatgcctacaatgatttgcttgcaggtgaattgaaaggtgccatggctgtgtttaaacgttattttctgagtgataccgccaatcaggctgacctcctgctggctatcactaccgaaagttccgactgtgctctttccgtggtagagcaaccccctttggatgggacgaaaatagctttgtgggcttatttacagaccaatgtgcagacacaagtgctgcacaacggattgtttgaagtaaagcacaatgcgtaccgccacctgtggggaggcagtgttttcaatcgtgccgcaaattctgagtaccagacccgtttgttgctgaatgactacgcgatgcaacttatggaacaaggatgtaaattggcggataactgtatccgtacctggttcttcgtacagaatgtggatgtgaattatgccggtgtggtaaaggcgcgtaatgaggttttcgtcactcagaacctgacggaaaaaacacactatattgccagtacaggtatcggcggacgtcatgctgatcctaaagtattggtgcaaatggatacctatgctgtggcaggcttaaagccggaacagatacacttcctttatgctcctacgcatctgaatcctacttatgagtatggtgtcagctttgaacgcggaacgtatgtcgattacggtgaccggcgtcaagtgtttatttcaggtacggcaagtatcaacaataaaggggaagtagtataccccggcgacatccgtaggcagacggaacggatgtgggaaaatgtagaagccttgctgaaagaggcggagtgcacgtttgatgatttggggcatatgattgtttacttgcgtgacattgcagactatgcagttgtgaagagtatgtatgacaagtgtttcccagatactcctaaagtatttgtacatgcgcctgtatgccgtcccggatggttgatcgaaatggaatgtatgggagttaaggctttgaagaataaggaatatgcacctttttaatctgaagaaaagtctcgtctccttatatatctgtctggtggctttacttgctgtggtgacctttgtggagcatgtacacggaacagagtttgtagaaaagtatgtttatcatacagtttggttttgttgtttgtggggagtacttgctgcattggcagttgtcgtgttggttaagcggcagttgtggcggcatctcccggcattgttgttgcatggctccttcctttttatcttggtgggagccatgattacattttcatgcagcaagaaaggatatatgcatctcacagtaggcactgaggtgggaactttcatagaccaagacagtaagcgggtgatcgaattaccattcacattgtgtctggacagtttccgggtggagtattatccggggacggaggctccggcagattatgtcagctatatccgggatgcggaaccagtttccatgaatcgtatcctctctcgtcaggggtatcgcttttaccagtcttcttttgatgatgataaggaggggagttggttgtcagtgaattatgatccgtggggaataggggttacgtatgcaggatatattttgctgggtatctccatgttgtggatgcttgtcggtcgcagtggagaattccgtagattactcaggcatccattgcttcggaaagggggaatgtttgtgtggttgctcatggctgtggtaacggtggtgcaagcagaaaacagaagccttccggcacttgcactcaggcaggcggatagtctggcattcaaacaagtgatttatcatgatcgcgtagtaccttttaatactcttgcacgagactttgtattgaaactgaccggaaaaccttcttatggtggtatgacacccgaacaggttgtcggaggttggctacttcgtccggaggtttggcagaatgaaccgatgatttatataaagagtgcggaacttcgtcatttactccggttatcgtcttcttatgcccgtcttactgatttgtttgatggacaaaactatcgattgcaggaattttggaagggtggacaaaagccacatatgaaaatgacttcgttggaaaaggctatcatggaaacggacgaaaaggtaggattgatactgatgctacggagtggaacacttatccatcctttaccggaagatgggagtataaaaccactatctgacgtaaaagtgcaggctgaaatattgtacaatcgtattccattcagcaaactgttgttcatgttcaatctgactgtagggatgctggcatttttctatttactttattgcagcatgcatcgttcggcaggtaaggcatggagcgtttttacagttgcactttatgcagcattcctttttcaactctttggctactgtttgcggtggtatgttggcggacgtattccgttgagcaatggatatgaaaccatgcaatttatggcactgtgtacacttctgcttgcatgcatattccggtgtcgcttctcttttacgttgtcttttggattgctcatttcgggttttgccttgttggtagcttatcttgggcagaacaatcctcagatcactcctctgatgcctgtgttgctgtctccctggttaagtattcatgtttctctgattatggtatcttatgcattgtttgcctttatgatgctaaatggattactggcattctgcataggaggttggcgaaaaaaggcaatcgattcggagattcaggaacagcgtaaggtccgtgtggagcaattgatgcttttcagtcggttgatgctctatccggcagtattttgtctgggggcgggaatttttattggtgctgtgtgggcaaatgtttcatgggggcgttattgggcctgggacccgaaagaagtctgggctttgatctcctttttaatctatggtgcggcattccacggaccatcgcttgccgtcttccggcaaccccggttcttccatgcttatatggtgttggctttccttacggtgctgatgacttacttcggagtaaattatctgctgggcggtatgcatagctatgcctgattatctttctatttttggatgatataataaaaatgcctgcggaattcgcctatgcacccaaagagaacgcccggtacgtgttttccgggtaggggcaggccggctcccccccgtatcagcgtgaccgtgccggaagaggtgagccaacaggaggacctgctggtagcccggtcatctgagctcgggggaaacagtaacacggctgttgcactgaccttcaaccatgcactgaccgccgtcagattcgtgtgcgggaatgatatgcgggaaggtacggtcaagcaggtccgtttgaaaaacgtttattccagaggaacttacaatatggggacacaaacctggagcggtttggatactcccgcctccttctcacaggcattggataaagtgacgacaggaacagctgacgaggcgctcacgagtgaggcgcagacctttatgatgctgccccagcggtttcctgagggcgcgcagatagaagtcttattcacagacgacacccatacaggccacactttaatagccgatataaaaggaagtgagtggccgatgggcaagactgtgacctacaaaatatccagtagttctctcaactggacttacacgcttgatgtcactgccctggccgattttacatataccggtggtacacagcaatattgtgttaccagttacaggcaaaacgcccaaggggaaaaagaagctgccgaatggaccgcacaatatgcagaagacggaaccacgtggacagacaccaagccggtatggcttaccgcattcacggcatctggtaccggcggtgaatttgcgcaaccttgtgatgcgacggtcgaggcgcagaccggaatatcaaatgatttacatgagaatgctttgaaggcggccacagccaagggatcggaaaccacaccgtataacctttccaacaacaccggggggaatactgttgagaacactgccaactgttacgtggtcaacgctcccggttactattctttgccgctggtatatggcaatgcgatcaagaactcagccacgaacgcttccgcgtatacctccacggtgacaggaaccaatatcctgaatcctttcatcaaccatgccgggaacgggatcacggatccatacatcagcggtaatggatgtacgccggccaaggccgaactggtctggcaggatgcgatgaacctggttacggatataaaatacaatgccgattccaatggcggcaatatctctttcaaagtggaccgttcttccatccggcaaggcaatgccgtcattgcgatcaaggatgtgagtgatgccatcctctggtcctggcatgtctgggttacagacgaagacattaacaatgtgattgagataaccaatcatcaaaacgtaaaatataattttatgcccgttaatctgggacaatgcgacggtaataccatcacctatgaagaacggagttgcaaggtaaaattcattgccggggaccagagtaaggaaataaccatcaagcagttggcgaacgtaatcgctaccggaagtaatgctcctttttatcaatggggacgtaaagatccgctctacccttcgaacggaatgggtaacacaaccaaaatctggtatgacaaggagggaattccatctacagcaaatcctatgaaaggaaccttttcggccgggaatgattgtatcaagaactgtattctcaatcctaatctgatgcacaatagatataatggagattatacctattacaacctgtggagtgccgataataaaacaacttctgccaatgacaatcctgttaacaagactatttacgatccgtgtcccgttggttttaaacttcctgccagtaacgctttcacaggatttaccacaacaggagaaagtgtatcatcttccactcaagttaacggtacctggagtagttcggaaaaaggttggtatttttatacaaattccgaaaaaacacagagcattttcttcccggcgttagggtatcgtagttattccactatgcggccaggtagtatcgggacacagggttgcttctggtcggcacatccggtagcgaagggcaataattattaccttagaactagctcagtagacgtacagccaacatatatggtcgatcggggattcgggtatgcgctccgtccttgccaagactaaagggttgcaataaaaacaaggagctgcttactaacacagttgcagctcgagaaagaacacggcacagagggaaaaaaggtaagtcaaattagccgaagcggagaacatgattcattgcttcggctttttctcatctatgtttggaactcatcagcgtctttccttagctcccgagctgtttattgagcagctttacacgctttcagcgtttctttctacttccttctgtcgtactcagaatcgatcacagaatcggttcggttccggatgaatccgttatctctctactagttgcatttgatttccagcatatcaaaggctctcctctacttccccccacatcaacaaataacggtatttcacattattatcctgcactcgttgcatccactgcggttttcccactttttatcactaactttatagataaaatccctccgaagagaattgccaatgacacgatcaggaaatactcggaatgggaaatatatgggagaggataaaaggagatatcatactataacgaatatattacaatataatctgatccctgatttttttactatatttgcaaagtattgtataacatttaaaaatatgaccatggaaaaaacatttgcacaaatcagtgaattgtttgatcaattttcaaaagatgccagcctccaggtagaaaaaggaaacaaagctgccggaacccgtgcccgcaaagcatcactcgaacttgaaaaactcctcaaacgtttcagaaaagagtcactcgaagcctcgaagtaatttttactctggtctcgacggtatggaaatggcggcatagcgtgtaccatatcgaaaaaaaacttttcgtttcacagcggggaggctttattagttgtgataaaattaaatatcaattatgtgaaatttctatttcgcttctgaaaaaacaactctactttcgtatatctgttggattccgcaggtgtatagtcggcaatttctccttaactaattctgataatacgttcggccgatattccatgtcattccagttctgtagcaaccaagcaagctcttgatatattcaaagaatcgttgatacctgatgtaccagtagaactgtcggcagcaccagttactctcacggataaactgtattttttcgttacacgggccagttcgttaaaattaagcctttgtgaggtatcctttaggacaccgtattggaagcaaaaaagaaatagataggtgtaccaatacattccccatcagcgtatgaaaaaaacattggaatccatagaaagggtgtcctgaaagccaaactgcatatttcgggaaatcgtataattacatgatggctttccactttcagattgaaaggttgtcgtgtcaagaagtgatgaaccgctccaatagctatgcttcagccctccacgaagtgagttcaaaccgctgtaagcgttattggatatgtacatctagttatattatatttataaaaatatcaaaaacaataagttacaatataccataagaagctatttttatttatccgaacacaaagttatgctttaaaaataaaatgtcaaggctgaaatgaattatgattttttaaatatgctaaattgcttctgttttaatactgttgtcttttcacttataaacataccaactccggaggcaaaggctgggatggtttgtcggcatattcgccgttaaaccgtcctgttttcgtttaacgaaaacacaacttgctgtcccctaatggggacaacgttttgaatatcacgctatatccatatagtgctataaagccttttgtcaggggaaaaatgcatacggtttctgccattttttccgcatttccggttttttgaatgtaaatgtttccccacagaacatgcgtcttcccactatactgctataactatatagccatataaaagaatcagaaattaaaatatcattgattgacagcataattcaccgatttacgggaatgtcttctgtagtctttagtccgctataccactatcagtatagctttagttatctctatttcgaggtcatcctctatgcagctcaccatatcatgttatatcactatcagcatatccccgtttatccttattccgatgtcacgccctataccgcacggcattcgtttggaaccctgatgctgtcctccggcatcccgatagagagcatcgccaagatgatgggccatacgaacatcaacagtacgcaggtctatgcataggttaccgaccagaagatatccggtgacatggaccggctgatgaaaagaagacagaaagggagtacggtccccctaacggaaatatccgaataatgaaatgccagccgaaaccgatgtttaatggttccggccggcattcttgagtattgaacgtccgattatatcagggcctcatgataattatcttccaggagtttctcaatgtcggataccttatacaaaatttttccacctagccggatataagaaatacgcccctggtccctataatcctgcaggcatctgcggctgatttttaacaggtccgacaattccttgtcagagagaaaacgctcaccgttaaacagggggcggttatcctccgcaagcctttccagcttcgtctgaatgttatccagcaggccaaagaatcggcggacactgcacgtctctttgctaataattccttccatgttgcatccaattaattattcattctttcttttttctctcaccgccttttccttgcgtttcatggcggcatagaccatcagcttttccacgtcctccggcctgtagtagattttccgttggatttgggtgaatgccagccgtccggtatcccggagagtctgcagggtacgtggagagatgtcaaggcgcaggcagacatcctggttatccattcactctcccggtttcttttccctgtttttttcatacaagcggtccacctgtgcggacaggctatcagccctagccagcatttcctcaaagattccggcttcaatgtaatatacttccatttttcttgtttttatttaaaatagcttccttttagaaactcaaattattgaaatacagttcaaaatactttccaaatgcacttccggatgggagtcgtgatttccgactccccctccagagctgttttaaggaggacttcccgtcatattacggctgtaacagtttgtaatctcgtcctgtgatcttctttatcatgccggcgttttctttgatatgttcaaccagtatgcggcttataacaccggaaacagtaaaatccttacgtctgactgcccagacaatgtctgagatacattcgtacacctgtgcatcaatatgcaggggcttgcgccggttggatgaaaaattgttcaggagggcttcaatgtatttttttacctcttcatccgttatcgtctttttactttccgcccgggatgaagactccttgtggggcggcacctcttccagattctcggaaatactgctcaaatatgagcctttagcggcaactatatccagtatctccttctcgttgatattatacggttttgtttttttcctttcaatgctgtccataactatgatttatacattaattccatgtgacaattgggcgttttgtaaggcggatgttcctgatggcggattatcgtcctactctgcaaagaaaaaaagaataaacgtgggaaaggataccttgtcagttatagtcatatatagacatgaatagtcaatgccagcaaaagacataacaaatggcagtccggcgggaggccaggattctccccgatgttgctaggattgtgacatgtcaagccatggagatattgacagcttacattcttgggataatggtacaccaggctacggatattgtaacagcttatgttattggaatagtgatatgtcaagctatgaagatagcgggaactcatgttggcaagatagcgatatacgaggagacagcaggacgggaacactacggcgatgaaaagaaaaatccctgttggtccatgtgagaccggcagggagcgtaacaataaaaggaacgggcttctcagcccctgatgtaaccgtactttttcaggtcgtccatgaactgctccggggtgtcggttctcaccgtcaccccgtgcagttccctgtaccgtccggagaaattcactatgtactcctcgtcggtgcatccgctgtcaaaccagctgccttcacgcaggatgcgtacaaactcggaagggccggaggcggcaatcctgccgccatccgctaaaatatatatgcctgttcatgtcgatatttttttagtccttaaatttataatatagtttctgttcactgtcgaggaaggggatgttctggagcgcggtggccacaggcacctgtcccctcgtggcaaaggtaactaatttgtggagaaacagtacccagttgcgcatttttgtgaagcaggtcgttccggaatgctggcggaactcgatcgtcttgtgccgtgagtaggcctcgaggtccaccttatggtaacggtcaccgatccttcctttcagctcgtccaccatccgggcggaacgtatcatcccgtcagagacatgacccaggccacggcaatagtagttgtccctgcgggatgccggtatgaacctgtcgatgaccggttccaggtgcttgtagctcagggacaggttacgccaggtttccatgctgaaaccggcggcatcgatatgtacatgaagcccgcagctcccgttcaccttcacgtcacacaggtcaagcacccagcagcccttctccagttcctgtaacccggcttcaccgaccaggatcggactgaccagttcaaaggtgtcgttgccgttcagactgccgtccgtcacgagtttccaatgcggacgggtggtatggttataactttccaccataacctcgataccggcctccctgagctcgcgtgcgagccgttcacgggagcagttgtaagcctcgatctcgataccgaacttgcgggtgaaagtataatccagtgcagctgtcgccggatggatattcagaccgccctcacgttcattcatccggcgcagggcgttcacgacaaaaccgtaattaccgttggtcaccatccttgcgatttccgcacggggaatccctaaaagatacagttgccggatcttgctcgtttttgttgtctcttgtgctaaaatgcttctaacttgcttgttcataacttgttagcttctttatttactctactaagataatgcttttataggagaaactataatcataagaactttattatcactgcattagcttactttgttttagactaaaagtccttattggggggatccttatcttatccgctgcaagtcccggatgacaaaaggcggcaatatatcggaatagtcagataacgatatatcatgatatggctgaccgcataagatgtgacatcgaaataggaatagacggggatatgttgatagcggtataacgggttagccggatagcgatatatcatgatatggcgaaccacatagggggtgacatcgaaatagagataactaaagctatgccgatagtggtatagcggactaaagactacagaagagattctcgaaaatcaatgaattatgctgtcaatcaatgatatttcaatttccgattcttttttatatggctatatggttatagcagtatagcgggaagacgcacgttctgtggggaaatattccccttcagaagatcggaaatgcagaaaaaccggcggaaaccgtatgcgtttttcccctgacaaaaggctttatagcactatatggatatagcgtaatattcaaatcgttgtccccattaggggacagcaagttgtgttttcgtttaacgaaaaccgaatggtttaacagcatatttcgctgccaaaccattattcagttcatgctcctaagtcgcacagaatcataaaaccgatatctgtctttggactatttatccctacaaattgcgctattagattctcataccacacgaaaaaaaagacatccagagacttttacaatgtatgggatgtatacaatcggccaatgttcagtatatcgcagcagacactcaatccatactttaataccatcattcaatgctaacacatcacctctatttttcgatcagtccattcaagtattataacatagattatagtaatggactgtaagaccattgctgaagacaagaacaagattttttatacctatttcaatactctggacatcatccttgctaatgttttgaacagattctcctccatacataatctcaacggaaataaattctatattacgatactgcttgtaccatctctcgaatagaaaataaactacacctttcatctggcaaaacagaacgattgacatcaaatgggaaacagttttccaaccactcatgagaaggaggataacgaaataaaccaaacactctacatctattggctgggataaatagctaaaaagaaaatttgcgaatcaaatattattttatatttttgtttctcaaaatttttaatgaactaaaaagaattaaaatgcctgcaaaactcactcgtccagagaattcttttaataatatttatatgcgatattacaaaaagtcttttctatttgtaaagtcgtatatacacaatgagatggtagccgaggatattgcatctgaatcactcatcaaactgtggcaatggatacaggacaacccggtggaaaatattgaaccgatgttgctcagtattttgcgaaataaagccttagactacttacgtcatgaaagcatgaaacaacaggtcatcacacggattagtgagaaacaaaatgaagagttagctcttcgcctctcctcactggaagactgtaatccaaatgaaatattctcgaaagaagttatggatattgtgcaaagaacattgcaatcattacctgaacaaacctcccgtatatttactctcagccgatttggaaataaaacaaatcgggaaattgcctgcgaattaaatatttcaatcaaagatgtggaatatcatatatccaaatcacttaaggctcttagaaaaacgctaaaagattacctgcctttattttatccttaattccgcaacactattacaaatataactttttaagtacctgagcaacaaaaagttgctcaggaatttgccatgtcagatttttcacctatcttagtgttgcaaatcaaaatatgtatcaaacccgacagacatggcaaaggtagcaattaaatccgagaaactcactccttttggaggaatattttcaataatggagcaatttgactccagactctcatctgtaatcgactcaaccctcggtatgagatgcaggctgtatggttatcaatacagcgaaatcatccgttcgcttatgagcgtttatttttgtggcggctcatgcatcgaggatgtcaccactcatctgatgtaccacctttcgcttcatccgacacttcgcacatgcagtgccgacacgattcttagagccataaaggaactgacccaggataacatttcctacacatccgacactggcaagacctacgacttcaacacggcagacaagctgaatacactgctcctcaattgcctattgtccacagggcagctgaaagagggcgaggggtatgacgttgacttcgaccaccagttcatagaggctgagaagtttgatgcgaagcctacatacaagaagttccttggttatcgccctggcgtggcggttattggcaacttgattgtcggcattgagaacagcgacggcaacacaaatgtccgtttccaccagaaggacacgctgaagaggttctttgaaaggtttgaacaaaacaagcttattatcaaccgtttcagagctgattgcggctcgtgttctgaagagatagtggaagagattgctaaacactgcaagaccttctatatccgtgctaaccgatgcagttcgctctacaatgacatctttgccctcagaggttggaagaaagtggaattgggcggcattgagtttgagctggcctccattctcatcgagaaatggaaagggaaggcataccgtcttgtgattcaaagacagaagcggatagacggcgaactcgacctgtgggaaggagaatacacctaccgctgcatccttacaaatgactacgagtcttccgagaaagagattgtcgaattctataacctccgtggagggaaggaacgcatcttcgatgatatgaataacggattcggctggaacaggcttccaaaatcctttatgggagaaaacacggtgtttcttctgcttatggcactcatacgcaacttctataaattcatcatggcgaggcttgacgtgaagaggttcggactcaaagcaacaagccgcatcaagacgtttgtctttaagttcatctctgtgccagccaaatgggtcaggacatcaaggaagtatgtgctgaatatctattcatgcaacaatgcttatgccaatgtgttccagaatgactttggataacaccgacaacttatagtcgtgattttgcgtattgcctcaagtcgcatggtggggtaaggggcatttatatgtctttatggtgacattcgatgcactgtgccccctttttactaacgatgcagattcttttcgcttctgtatcatattaggcgcgtagttgcggatttgaggtttatttctttttttaccatatgtaacaccgattactacgcacgttcctttatcttttgaaaaaaatattctttttcgtttagggtaaaccgaagatgaatcgttatataaatgaaaacgataaaaagatggatgaactattacaaaaatatatagcaggaaatgcctctgaaaaagagtcacagaggataatggagtggctgcgcgaagatgaacagcatcttagagaatataagcggcaacgtaaattgtatgacattacgttatggcagactaaaagtcccgttgatatacaacaagagaagaaagatccgctgaggagggttctcgatgttattgtacggatagcggctgtcattgtttttactgtggcaaccacttatttttacactcaccacgttttacaagacaaggaggagaatatgcaaacggtagttgttccggcaggccagcatgccgaattatacctggctgatggaacgcatgtatggctgaattccggtagccggttgacttttccgggacggttttctaaaaaggtacgtcatgtagaattagatggtgaaggatattttaaagtcagttctaatataaaacaaccttttattgttggaactaaccgatgcaatatccgggtgctggggacagaattcaatgtgctggcctatgagaaagatagtatatgggaaacagccttattggaaggtgctgtagaaattctgcaaaagaaaagtgaagtatctctcatgaaactgaaaccaggtgacatggccagactaagtaaaaaccaacttactaaagaaaagatacatacaacagactattttcgttggaaagaagggcttatttgtttcaacgatatctccctacgcgatataatggagaaattaaaactctattatgatgtgaattttgtcattaacaatcaacagattcttgatgcgcactataccggaaaattccggacccatgatgggattgaacatgtaatacgtgtgcttgccctcaataataaatttacctatattaaagataacgagagcaatacgataaccattaattaactttttaatatttctaatgcctatgaaacaataaagaaacatttaaaaaagaaaaggggacagtgctgcaacaccatcccacattttccatcagtttataccaactgacaaaatagttctagatcaagttaaacctaataaactaatatgttgcgaaaatatgaaaaattctctataccaggaattatttatagaaaataaacagttattccgtattatgaaaattattgtttacgtctgtttcttatgtgtaggaaatcttctagctataggaagctatgcgcagacagctcatgttacgattgtttccaaccatataacaatcggacaagtgattaatgaaatagagaaacaaacggactatctgtttgtattcaacgtaaaagatatcaatatcaaacgtaatgtcaaagtgaatgcgaaagataaagccgttaatgaagttttgaatgatatattcaaggatacaggcattcgccatgctatagaaggtaaaaacatcatgctcattaactctacggataaggaaaagggtgcgcagcaaaaagattttttagttacggggatagtaaaagatgaaaatggtgagcctattatcggagcaaatattcaagtcgtaggaaaatcggcaggcacaattacggatatgaacggacgtttcagtatcagtgcctctgccaattctacattgcaaataacctatattggctaccaaacgcagactgtcaatatcggcgagcagaggaatattaacattattctacaggaagacaatgcgcaattggatgaggtagtcgtagtggggtatggtacgatgaagaagaaagatctcaccggttcggtaacagctgttaaaggagacgaacttgctgcccgtcgtaccacccaactttccacagctttgcaaggcgcgctttccggagtaatggtcagtcgtgacaatggagctcccggtagtagtgcttctatccagatacgtggtgtaacaactattggtgattccagtccgttggtgattattgacggaattccgggtgatatcaactccgtaaatcctgaagacgtagaaagtatgtccgtattgaaggatgctgcttcggcttcgatctacggttcacgtgccgcagccggtgtaattgtcatcacgaccaaacgtgccaagagcggtgatgtggctttgagttacaactttgagtacgggtgggaaataccgactaagttgcctacctatgtaggagcccagcgttacatggaaatggtaaatgaaacacgctataacgataatccagacggtggatggtaccaaacatatacggaagatgaaattaccaactggagcataaataatgcgactaatccggacaaatatcctatgacggattggggagatattctgttgaaaagctccgcaccccggcagacacatactctaagcattgttggtgggggtaagattattcgtacaaaagcctctttccgctatgacaaaacggacggcctctatgtaaacaaggaatatgaccgttttatggtacgcgtgaataatgatttcaatataaataaatatatttccgcaaatctggatttgaacttttcccgttctaaagctctctcgcctaattccaaccccatgggggcaggtggacgaaacattccgccaatttatgctgctacatggaccaatggcttatggggtgatgtgaaagatggagaaaatatgctggccaaaattacagatggcggcacttttaccaactggggaaccaatattggcggtaaactcggtattgacataactcctgtcaatgggctgaaaatatcagcagccgtggcgcccaatttcaataatgtaaagaagaaaacttttgtcaaacagattccatacacccgttcagaagatccgaataccactgttggttacatgggaggttatcgcactaccaatttgacggaaaatcgtaatgacagccatgatataacaacacagttctttgccaactatgccaagacactggggcgccatgatttctctgtcatgatcggttacgaggattattatgctttctgggaaaacctggatgcatccagagaccagtaccagttgacaagctatccttacctggacctcggttcggaggattatcgggataatggtggcaatgcggaagaatatgcttaccgctcattattcggacgcatgacctatagctatgcagaccgctatcttatccaagcaaatctccgccgggatggttcttcacgttttgcatccaattgtcgttgggccaattttccttccgtgtcacttggttgggtaatttctgaagagaagtttttcaagaatataaatatggattggttttcttacctgaaattgagaggctcttggggaaaactgggaaacgaacgtatcggggcttatgacgatgacggtaactttatttataattattacccttaccaggctgcaattgattacagcactgcactatttcagaattcacaggggattgtttcttccgtgactacggccgcacagcagaagtatgccgtacgagatatttcatgggaaacaacagaaagctgggatatcggtttagatgctaattttctggataaccgtctgcacttctccgctgactattatagaaaaaatacgaaggacatgttgctggcactggaaattccacacttcatcggctacgacaacccggaagtcaatgccggaaacatgcacactaccggctatgatattgaagttggctggagggacaaagtcggtgatttcacttactccatttccgctaatctgtcagattttacctccaaaatgggaaacctgaatggtacacagttcctaggcaatcaggtaaaaatggaaggaagtgaatataacgaatggtatggttacgtaagcgatggcttgttcctgactcaggaagacgtggacaagtcgcccaaactgaacaacagcgtcaaagtgggtgatattaagtacaaggatatttccggaccggacggtgtccccgacggagttatctcacctgagtatgaccgtgtacttttgggcggttccctgcctcactatatgtttggactcactttcaatgctgcctataaaggctgggactttggattgacactacaaggtgttggaagtcagaaatctcaaatcagtgctgcaatgattgaagggcttcgagacaactggctcaatttccctactattcttgacggcaattattggagtccgaaaaatacggatgagcagaatgcgacagccaaatatccgcgcctgactcgcaccaatcgggatgctaatttctgtatgtctgattattggctttacaacggtcggtacattcgtttaaaaaatctctctgtcggttatacgctccccaaagcatggactacgaaggcgtgtatgaatacagtccgtctttatgtaagcggaagtgacctgtttaccatcagtaatgcccccaaaggatgggatccggaagtaagtacagaagggtatcctattaccacctctctaatatttggtgtttctattaatttctagccataaaaaacatgaaaaagttactcttatatatcggggcaggaatactcttactctctgcctgccatgatctcaatttaaatccattgtcaagcggttctactgaaaactggtattccacggaaactgaagtgcagatggccgttgatgagttatatcgatatgacttctggccggaagacggacaacaacagaccgactggtcggacgactatacttcacgcgatctcctgacctcttttgatgacggaactctaaatggacaaaatgcttgggttaccagtttatggggcaatcagtacaaagctatttcacgtgccaatgcagttattgagaaatcgcatcgtgctatcgaaaatggcgcatctgccactactattaaccgcctgattgccgaagccaaattccatagagctgccgcttatgccaaactgattgtaaagttcggtgacttaccattggtattaaccgatgtaagtacagaagaagggttgacaatgggacgtacggataaatccatcgtattggcacaaatctataaagattttgatgatgcaattagtgtgcttccaacttcctatactgaccaacagcgagccacccaaggtgctgcactggcactaaaagcccgggttgccttgattatggaagattgggaaacagcggccgatgcagccaaggcggttatggacttgaatatttatgaattgcatcccgattttggcaatctttttttgtctactacaaaaaactcgaatgaatttattttcaaaattccacgtgatgctacatatgacatttatctgggaacaggaaacggaggagttaaccaggtatacaatgatctaccccgtaacgtaggaggatggacgcagacctgtccgtcatgggagttactagctgcattcacctgtaccgacggtctgcttattaacgaatcaccactcttcgatccgcatgaaccatttgcaaatcgtgacccacgtttagcagaaaccattgtaccatttggttccaaccacctcggttatgaatacaacccacacccggaggcactgacgtgtatgaactataatacgggtgaaatcgtgacaaattatgatacacgtgccaatgcccaatatgcttctttcgatggtctggtgtggaaaaaagggatagacgaaacatggcttcagaatggtttcaaggtagaccaggatattatctattgtcgttatgccgaaatattgttgacatatgccgaggcgaaaatcgaattaaatgagatagataactccgtattggatgcactgaatgaggttcgggcgcgtgcttatggtgtggacaagtccgataaggcaagttatccggctttcacttctaacgaccagtccacacttcgccaccagctacgtgtagaacgtcgtatggaaatggcaaaggaacacatgcgatatacggatatcatccgttggaaactggccgaaaaggttatgaatcgcaagacatatggtatcctttatccggcctcactatgtatcgaacgggtaaccagtcagggagattggttttgggctttcacaccggaaatggacgaggatggttgtgcagatttctccaaattggaagaagcgggtaaatgtcaggcacttgctgtacgtagttggaacgatcgccaatatttgtggcctatccctactacggaacttcagatcaacgagaacttaaaacaaaatcccggctattaaatgcaggaaagttgttgatagtccgggaaaaggtaactccttaattattcacccttttatttttctaactttatgattggaaagagctatatttttcacctttttctatttcttctcatattaccagacagtatttattctcaagataatatttgtctgatcccgcaagttgaaagcatggtccggaaaaaaggtacgctatccatcgaacgtctggaaagcatccatttcccggacgaatggaaaaatacaggaaacctccttgtcagcgatctgaaagaactggcaaatttgtctgtcatggtgaatgcctcaaatccttccattcatgtaaaaaaggtgaaaatgcaggagccggaaatgtacatgctggaaattacaaagcaggggatcatcatagaagcaggtgaccagacaggtatgattcatgctttttccactcttttacaattgattctgggaagtgagggaaaagagttaccccggctcataatccacgacaaaccccgttttagttacaggggagtcatgatagattgtagccgccatttctggactatcgaacaacttaaaaagtataccaaacaattggccttttttaaacttaacactttacatctgcacttgacagacaatcaaggctggcgtctgtatctggaccaatatccggatttagcgttcaaaggtacgtactaccggacattcgaggatctatcgggacattattatcgtaaaagcgagttgcaggaattgatcaactatgccgccatgtacggcatagagatcattccggagattgaccttccgggacactgtctggccttgcttgcagcccttccccaactgtcatgtaaaggcggaaaatttgaagcctatccagaggaactggacggacaaaaacggaagagagcagatgagaatatgctgtgtataggaaatcctgaaacctataggtttgtggaaaaactggtagcagaactcactgatctcttcccttcatcattcatacatctgggaggagatgaagtgtcgacacatctatgggaacaatgtccgaaatgccaaaagatttacaaacaagagaatatgacttcatggcacgagttacaggactattttacgaaacgagttagtgaaattgtacgttccaagggaaaaaggatgataggttgggatgaaataaatgaccgtaatgccgctgacatcagtgacgtgatcatgatctggcaacgtgatggaagagaacagcaacagaaagctttgaaaagagggttgtcagtcattatgtctcctaaggatccctgttactttgatttcgggtattcacggaattccacacgcagattgtatgaatgggaaccagttggcaaagaatgtacgaatactcaagcacatctcgtcaagggaggacaggctaatttgtggactgaattcattacaacctcggatgaggtggaaaggatgttatatcccagaacttgtgccttggccgaaaccctctggaacacgaaagaaaagaaagaatgggaagggttccgacaacgtatcagcaagttcggtgctattatggaaaaactgaatatctgttacttcaaagacgaggattgggataacacaggttttgttccgcaaagcgaacaaaggccccgtcttgtatgtcctgcccgtatcgataccaatatgaagggaatcaagtattatatgcctgaatatgcgtttgacggtgatatacagactttctttgcaaccccctattccttaaaaaaaggagattattttactcttactttggaaaaaagacaagcagtacaggaaatcagaattgtgtttgatgtttcaaaggaacatccggaacatgtacaattatctgtcagcgaggacggtacaatatttaagaaagtagctgcagataacaaaaatggagaattgtcagcatctttcagtacactagccatgattaaagccctcaaaatggaattgacaactccactgatggcccggctgactatcaaggagattatccttcgctactatgaataaacaagtataagaataatgaaaattgttatgataaaaaaaattatatatatttctctcatctggatggtatttcacggagcgagtcttcatgctgccagtttattggtagaagcagaaagtttcacggaaaaaggaggctgggtagtggaccaacaatttatggacttgatgggatcaccttatttactggcacacggtctaggtagtcctgttgaaaatgcgagtaccaatgtacaacttccagaaaatggcacatattatatttttgtacgcacctacaactggacgtctccatggcaggagggtgaagggcccggattgttcggtttgtcagtaaacggaaagaaaatctcttaccggttgggtattataggcaatcagtggatatggcagtatgccgggcaatatcaggcaacagaaaagaatattcacattgttttgcatgacttgaaaggttttgacgggcggtgtgatgctatttattttacgacacggaaagatgatattccgccatcggatatggcggctttaaataactttcgtcgtgctaaacttggattattagcccccccaaaaacagaatcatatgatttagtagttataggtgcaggtattgcaggtatgagtacagcagtatctgccgcccgcctgggctgtaaagtcgcacttatcaatgatcgccctgtagtcggtggaaacaatagttccgagattcgtgttcatttgggaggagctatcgagatcggaaaatatcctgaactgggggggctgcaaaaagagttcggtcccgtcaaggagggtaatgcacaaccggcaggcaattatgaagatcataaaaaaatggaatggctgcaagctgaaactaatgtttccctgtttcttaattatcgggcattttcggtgaagaaggaagaggaccggatcatctcgataaccgcttgtcatattgaatccggtgaagaaatcgaattttatggtcgtttatttgctgactgtactggtgatggcactatcggttatctggccggggcagactatcgtatgggccgtgaaagccgttctgaatacggtgagactatagctcccgaaatagctgatagcttagtaatgggcacttctgttcaatggtattctgtggaagacacaaaaacatcctattttccggaattccggtacggcatcgaattcaatgaggagacctgtgaacctgtcacttatggtgaatggacttgggaaaccggaatgaataaaaatcagattaatgattctgaacaaatacgtgactatggaatgttagttatatattctaattggagctacttgaaaaatcaatcggaacgaagaaaatattataaaaaacgttcattggaatgggtagcctacattgccggaaagcgggaatcccggaggctattgggcgactatgtactgaaagaggatgatttaacaaagcacgtagcccatgaggacgcatctttcactactacctggagtattgatctgcaccggcccgaccccgagaatacccggtatttcccgggacgggaattcaaagcgacgacagaccatgtagtaatttatccctatcctgttccctaccgatgtctttattcccgtaatatagacaatctgttcatggcaggacgcaatatcagtgtcacacatgttgccttgggaaccgtacgagttatgcgcactacaggtatgatgggggaagttgtaggcatggcagcctcactatgcaaaaaatatcaagccactccccgtgacatataccattattatttggaggaattaaaatcactcatgcaaaagggagtgaataaaaagggattaccgaataatcaacgatataatgaaggaggcaggctaaaccagataccgaaggtaaagtaaggatacatctctgtctgccagatttccacatacgaaagtttaacaatttattagattaggcattatgataagaaaaatcatattcttagaaatgttattattgggaatagctacattcctgtattcgcaagatgaaatttccaaaataacaataactcatggaccttacttgcaaaacgtgggatctaacgaagctaccattgtatggataacggataagccctctataggatgggtggaactggcctcagatggcaacggcagtttttacgccaaagagcatccgcgttattttgacacgtctaatggcatcaagaatacatcaaccatccatgccgttaaagtcaagggactgacaccgggaaaacaatatcgttaccgtgtttttgctcaggaagtgttgaaacatactgggtataaaatcatttatggaagttatgcttccactgatgtctattatcgtaaaccgcttacttttcatacctgcaatccgcaagcgcctgccacctcttttgtaatggtcaacgatatacatggggacaacaaactgctggaggacttaatgtcccgttgtaaccttacgcaaaccgactttgttctttttaatggtgatatgctctctttcataaatagtgaagatcagcttttcaaggggtttatggatacggctgtacgacttttcgcttctgagatcccgatgtactacgcccgtggcaaccacgaaacacggggagtatttgcaaccgaaatccaacgttatttttctccctgtcaggaacatctttattatgcctttcgacaaggtcctgtctattgtattgttctggatacgggagaagataagcctgattctgatattgaatatgccggtattacccaatatgacctctaccgtaccgaacagtccgaatggttggccagtattttggaaagtaccgaatataaagaagcgccttttaaaataattgtagctcacattcctcccgcagttactgaagctggtcccgatgaggattggcatggaaatgtagaagtagagcagaagtttatgcctttattacgccaggcttatccggatttaatgctttgtggacacttacatcgttttgtgcgtcatgatgccactgacaaaacgtctttccccgtagtagttaattccaatacatctttgctacgtatttatgccacgaccacacagatgaagatagaggtaatggatcgagacggaaaaatgctggatgaatttatcataaaaaaataaaaagctttgcattagtacttggcaagtaattattcgggtgacaattacttcttaatcaatgaagctggtttctgcagattctgcatgtatgagaggctgatgaatttaggaataaccaacatttacggggtaatccagtcgatgtgcctaccatgagcaaggagaagttacgcaagaccaatgctgtgaattgtagcaaattggcccacgagttacctttcggttcatttgaaaaggaattatattctggggaggaaaccacaaaaatacgctctttataagactaagaaacctgattgcaaaagacagcatacataccaagaaccgtatcaagtctttgctcgtttttatggtgtggaaatatcgagaatgtttgcccgatgtaccattagctagggatattcctaaaataggaaaatttaaggcaactaattcattgcgagttagttgccttttggagtttgcccgacatgggcataatctaatgggtgtaagtccccatcgcagccttatatcggcaagcgtacagccgacggcaatggtgtccgtagtgattcggcatctaaaggaagtcttaggcaaagcactgacctgacgtacagaaacttgatactaaggcatatgagtgtgggtaagtctgccaaacaagataaagccctatagctatatggaacactcggtgtaaatcaagcaggtataagtgtgaaagattatattcttaatcggggaggtctcacggacgtgtggagcatgtgtttagattgccaaacacggagtaaagcttattgtgagaagtcagcagaagccatagtacttaagttctttttaaggaagggctgaatcgcaatagctataaacacgtaactaactctaaataggaaagaatgcataaaataagagtcatagaaagtacacttggctaccctcaaaagaataggatggaatccgaaagctatgagggagtgcagacctatatggacatgaaagacggcagtttgatagcagtgcaaccaaataaagatgacttaatgagtcaaattctttctcccgacaatctcaatcgtgcctatctacaagtggtacgaaacaaaggggttggaggtgttgatagaatggattttaagcaactgcttccctatcttcatgaacacaaatcagaacttatcgagtcgatacgcattggaaggtacaaaccgaattcagtgcgtagggtagatatagccaaggataacgggaagaaacggcttataggcatcccaaccgttgttgaccgcttgatacaacaagccatcgtccaagtgctatcgcctatctacgaacgccagttcagcccaagcagttttgggtttcgccccgacgtagtgcgcatgtagcattgctccaagtgtgctgttatacaagcgaaggctacaaatatgctgtaggcatagaccttgttagattctttgatacggtaaaccatagtttcttactgagaatactgtcaaggacaataaatgacgggcgtgtcatttctcttatacacaagtatcttacaagcggagtaatgataggtaagcattatgaaccaagtatagagggtacaccacaaggcgcccctttgagccccttgctcagcaatatcctgctgaacgaactagacaaggaattggagagacgtggacactgctttgtacgctatgcagatgatagcatgatactgtgcaaaagtaagaggtccgccgaacgcgtatgctcaagcataacggacttttccttctatttcacgaaaggcaaatgcaggctgtatgttcacaagacaacaaaagagaaattcaaacgtaaggttaaatctcttaccagacgtagtaacagcatgggttatgcccaacgtaaagagatactctggcaaacctttagaggttggatagggtatttcaaatatgcagacatgaggagtctgctgattccattagaccaatggtatcgcagacacttgcgtatgtgtatatggaaatgttggaagagagtgaagactcgcttttcaaatttgcagaaatgtggaataccgaaaggtaaggcttgggagtgggcaaatactcggaaagggtattggcgttgtacgcgtgcctttcttcagaatgctattgaggacgaggctcttcggaaagcggggtatccaatgttatctcatctttataagcaaatacatatagattgcgaaaccgccgtatgcggaaccgcttgtacggtagggtgagattgtgccacgagaagcatgtgctaaatgcttcgcaactatgtaggagatgagggtaggtccctcgcaatcaacttgcaggaatctcctcagtactgaatgctttgataagattgctgtcgaccaattctttaagtggacatcaattcctacatctaatgtgttactttgtacacgtctcataagctatatcgttttagttaatgagttatgacttcaatataatatgaagtttactaaaatggtatagcttttttagtgctatctactgttatccgtcacttcagattttaaacatagaaacttatttttttataatcataccgtccaatttattattaattttccagcaaggataccttcgtcagccactatacgtttcattggaagatcccgtaatccatttataaaatcaatagctgattttaatggaggttgattctttatagtatcacttgaaatataaaacttagttctagaactaaaaagtaagtaaacaaaaaggcggagaatagcagtctccacctttttatttattctttggccttttgtattatagtaattgtattatagtaattccctgcttgtataactgttgtaaatctcctttccaagcctgttaaatttgaatcaatcctgataaagattgatttgcgacctgttttctccacataaagtccaccaccttctattacttgaacattaagggagtgtgttctatatatcgtgtctttagtagagatttcagtcagccaccagtcgtcacctttcctggttcgtaactctatagaatctttactggatttaaaaaatacctctttagtctctagtcctatcgtatctgttcccttgccaacgacgtcatcgctacatgaaatgaatacaaataaaagtaacacgaaagacagaaaataataagtttgtctcatatttcttattttattatgttaatatatggaattatttctacattatatggataattacccttgccggctgctctagtagaaggaaaagtaggtccttcacctccattaaaaatacccgccaaataataaccattactattaccattccagccccagtttagatgcaggtaatcttctttctccgtatacgaatgatgaactttatcgcttccttttctatagacatcaacatttctctctctatgaaaatagccatcagaaacccaagcatgaccattttggtaatatttaatacccagtattttctttcttaccgaattgccacatattataaccggacatttagctttaatagatgttataacatcccattgactataaatttgaggattattgggtttcctatatcccattttctcgaagcattgtggtatattttttcttttagctccgcttgtatctgttccccaatccattttaaccaaatcacctatagagcggaataaatgggcaactgctggagtggtggggaattgtttcatttcagaccaattatatgacaccccattataccctgaaggtttttcatgatatgccattacttgagctattgcagtagctacacagcctgtgagggctctttgtccttctataagaggtgccgcattgttatatggactcctttgtccccatttaacagaaatcaaaggttgtactctttccgtttcttcccattctccaggtttctttatataaataggacgtcttctaccccttgtttgagatgtgtctaaagagttatcgtcatcattttcttctttgaactctatctcatactttttattattagaaatgtaattttgaactaaatcaaaaaagaaagataattcctgatattgaagcgtgtcacttaaagaaagattgccagactctgaataagcaataataggagttgtatataggttggccgatactattgcatagccattgccaccctctgcattggctatataaaatgagggatatgtctgattagtaattgtatctctatagaaatagatttcattgtttattgaataattaagaaaagagctatttcgtgtattgtttctattatttttaataaaaagttccacttcaataatagcattctctttagtacgataagtcggggctttttctgttaaagatggtggcgaagattcttgtttcatcacttctgtgtcatcggaacatgaagttaaaaacataattgtcaaaatcaataaatgtgcatgttgtttcataatttatataattcctcaaatccgcaactacgcgcctaatatgatacagaagcgaaaagaatctgcatcgttagtaaaaagggggcacagtgcatcgaatgtcaccataaagacatataaatgccccttaccccaccatgcgacttgaggcaatacgcaaaatcacgactataagttgtcggtgttatccaaagtcattctggaacacattggcataagcattgttgcatgaatagatattcagcacatacttccttgatgtcctgacccatttggctggcacagagatgaacttaaagacaaacgtcttgatgcggcttgttgctttgagtccgaacctcttcacgtcaagcctcgccatgatgaatttatagaagttgcgtatgagtgccataagcagaagaaacaccgtgttttctcccataaaggattttggaagcctgttccagccgaatccgttattcatatcatcgaagatgcgttccttccctccacggaggttatagaattcgacaatctctttctcggaagactcgtagtcatttgtaaggatgcagcggtaggtgtattctccttcccacaggtcgagttcgccgtctatccgcttctgtctttgaatcacaagacggtatgccttccctttccatttctcgatgagaatggaggccagctcaaactcaatgccgcccaattccactttcttccaacctctgagggcaaagatgtcattgtagagcgaactgcatcggttagcacggatatagaaggtcttgcagtgtttagcaatctcttccactatctcttcagaacacgagccgcaatcagctctgaaacggttgataataagcttgttttgttcaaacctttcaaagaacctcttcagcgtgtccttctggtggaaacggacatttgtgttgccgtcgctgttctcaatgccgacaatcaagttgccaataaccgccacgccagggcgataaccaaggaacttcttgtatgtaggcttcgcatcaaacttctcagcctctatgaactggtggtcgaagtcaacgtcatacccctcgccctctttcagctgccctgtggacaataggcaattgaggagcagtgtattcagcttgtctgccgtgttgaagtcgtaggtcttgccagtgtcggatgtgtaggaaatgttatcctgggtcagttcctttatggctctaagaatcgtgtcggcactgcatgtgcgaagtgtcggatgaagcgaaaggtggtacatcagatgagtggtgacatcctcgatgcatgagccgccacaaaaataaacgctcataagcgaacggatgatttcgctgtattgataaccatacagcctgcatctcataccgagggttgagtcgattacagatgagagtctggagtcaaattgctccattattgaaaatattcctccaaaaggagtgagtttctcggatttaattgctacctttgccatgtctgtcgggtttgatacatattttgatttgcaacactaagataggtgaaaaatctgacatggcaaattcctgagcaactttttgttgctcaggtacttaaaaagttatatttgtaatagtgttgcggaattaaggtaattaaggttaatactgaatacgttaaaagtcaaaagtgccatgtttataagaggaccgggaaggtttataataatcctcacccggggtctggggttgtataaaatcttgtctgaatatttctgtaggattatctgtaattaaatctgcatcatgggtatatatgttaaaatagcactctggatctgttttttggttatatggtccttctcccacaaaagaaaatttgtaaaaaccaattttttctccgtcttttctgactgtaaggaaccagacattaccactacttatcgttttaaatctcaatccgtttaatgatgaataagtttcctctataaactggccattcaaatatgtctgttttttacaagtaaaaggtaactcaaatctaccaccttcagctggtagaataaaaggattctgttccgaatggattttatacacaaatgtcaactttcctttatctataattagtggaattttttctacttttatgccattaatagtagagtaagaaatctgtaaatcagcattcaaaattttatcttctttattaatatttgaggttatatttaatactacctgatcgccctccacttttatttctatatcagaaaaaagagttttatcaaattctaccgaaacatccctgggaataatcggaacctctgaacttaaaacatcatctattaatgttttttttataatcgtaatcgtaataatacgtttctctccaagacagctaaacggtttggatgcgtccttacttgttaatacttgatactctgtttttctattgttttcctctttttgacaggataacaatgctaaagaaataaacaaaagaataaatacctttctcatattaatgcaaattagttactataaataaaagtaatatttaatattgttgaaacctcaacatctgatacaatcttcaaggtcttttgtagagtttacaaacttatttccagcattataagacaattaaacaacaaactttttgttttgagggcttattttgaccgttatcttttctgtcttattggcatggttataaaacatacagtataattctgggaaaagacgttgaatttctttataatgcaaaaacttttttcatgataaaattaataatatcatactacaaagataagactaaatcgatgttttatagttatggaagaaaatataaaatctaacaaaaacatttatacacatcttataatcagatatttattattgagatgcttaatattatctaacgtaagactaacatttatattttaagacgttttgatgtcgacttaaatatccaatattagtttctaaaataaatagtaatatacaggtatactatctcaaacgattgaattttgcttccgttaaatacatatatgtctcagtaccaagaaggggtagtacagttgtcggcaaatacgaatatccgatcgtttttgagtgcaataaagtttattgtatcgactggctgtattttgtcggcaatatgaaggaactacttaattattttgaactgatggactaaacgaatgaaagtatacttctgcatcacctgccattatatagtaagtcaggcatgtatcaaaaggtatagattttgtactgccattttttaagaagtggataggcctactgggtgaaggcttctttgatatacgaggaaaaatgggtaaaggcgtacattatcttatggataaatatacctcaaaatatattcctgaatgaaagttgtatattctggaatatattttgcttttaacagaaaacaagtttcgcaaagaaaatctatgaattgagacttctattctctcacgagttgtgaagcatccgatagtacaatggaaaatatccctgattgccgaagaaacgtgattctccctcattcatcgccaaataaaaacgggagaaccgaatgctctaggtattgctcatatcctttacgtactcaggtagtccgcctatgggttgggaaatgcccgtttggcaggatttttttcccttatatagaacacaacgggctcatgagtgacacattcttcggatgggtatagcggattcagatacccctttataaatatcttttcatctcctgacaattgctgactatccatgactattcctgccatcagtccggtccagtttggcaggtatcgttttttctcttacattcgcatcaacgaatatttaaaatcgatcatatggaaatatattacattgaagccggtatctttgacaggatgctgggatgtgtcgaaagtctatcgacacgcgtggacaggctgtatgagaaaaatgcgaataaaggggttggtgagtgactggacggtcaggatgtctgcctgcgccttgacatttcttcccgtaccctgcagacccttcgtgataccggacggttggcgttcacccaggttcagcgtaaattttattacaaaccggaagatgtggagaggctgatgacttatgtcggtatgaggcgcaaggagaaggcggtgagagacagaagaaaaagcaataacttttaaaaaagcaagaaatggaaggaattatcggtaaggagagtgagagtatcctgcgtttctttattctgctggagaatattcaggtaaaaatggatcagctaatggagggtaaccgcccgccttttaacggtgaacggttcctgactgacagggagttgtccgggctgttgaaaatcagtcgcagatgtctgcaggattatcgtgaccagggtcggctcccctatgtccaactgggtggaaaggtgctgtataaaacgtcggacattgaaaaattattggaaggtaactatcacagggcgctgatataatattgccctttttaggctttaatgggatgagtgttgggactgtcaaggattccgacactcatcccattttttatctggacatttttagctcttaacccagtccgtatccttccgctttcttcttttcatgagccaatccatgtccgaggatattttctggtcagtgacttgcgcatatacctgcgtgctattgatgtttgtgtgtcccatcatcttggcgatgctttctatcggaataccggaggtcatcattagagttccgaacgaatgcctagccatatgataggataaattttccttcatccccagtgctacacccagcccgtggacctcgtaccagaggatatcccggaccggtaacggaaagaccggcttctcgttatccgtggtgttgtaaagttctagtatttgttcggctaccgggtgtaacgggataaatgcttctgcgcccgtcttagcccggcggatgcggatgtatcttcttcctagggaactcttttcaatgtggcgtggatggagtctgcgcgtatccacataggcaagccctgtgaaagaggagaatatgaatgtcctgcgtgccagctccatcatcgggtcgggcatcggggtctccattatcagtttcaactcattgcgcccgatgtgcttcaatttcggactgtccttcttctcgtatgccacgtcctctatcggattggctctcaatacttcccggtccacagcgatatagatgagcctgttaagccagcacaggcagtggttcacatgtccgttcccatgtcccagctctttcttgagaaagattttgaaggattcggcgaactcctcggtgatgtctgaaaaggcgatgtccctcatccccctggattcgatgaactgcctcagattgagctgggttgtctttgactggcgataagttgaggtggagttaatctcgactgaacggattctaagccgttcccgttctgcctctccggtctgcagcaggaattccggaatggaaacggtatttgatacggtagctttgagtaattccgccgtgaccactccctggttcttcagcaggttcccgtatgcctcttccagtcggctgcggaaagcggtaaggcggttgttttctttgttcatcctgatttctcctttgttactgtcccagtcactgggcttgcaatagatgcctgtcgtgacagctgacttcctgccgtcgatgctgatccggcagaggatggctgtcgttccgtccgatttcaccttgttacggttgatgtagaacatgagtctgaatgtactgcgcatggtaatgacgtttttaggattaaagaattagtttgagatcacgtgtcgcctcaatgaacctgtccatgtcttcgaacagtctcttcggggttacacgggcgtagatttgggtggtctttatgttggagtgtcccagcatcttgctgatggtctcgatcggcactccctcctcgagtgtgatcagagaagcgaaggaatgccttgctgtatggtagacaaggtcctggctgagtcctgccatcaggcgcagggatttcatattggccctgagcgtatggtagtcctgcggtggaaagagggtcatgcgggcatcatcacggtacttttcgatcagcacgagggcttccggcagcagcttgacgcgcccgaggtagttggtcttcttcctccggtacttcagccagagattgttttcttcatccgtgaagaggttctcccgagtgatacttaccacatcagcataggctgtgccggtgtagcaggcgaagaggaagaggtcccgggtgatgacatgcgacctgcgtttctccggaatctccagatcacgcagtttctcgaaattctcccggctgagtgctttcggtgtactttccttctgtttgggtagtttgaagtggcagaaatggtatttctccgaatgtccctccttgtaggcgatacggcagatctttttcaggatggccaggtagccgcgaagcgtgtccacggcatgtcctttttccatgaggatgaaatcctgatagtcgcggatgaactgctcgttgagttgcccgaatgccaggtccgagaccttgaacttcgccttgatgaattcggaaagcgtgcggtaggtgaagaggtaggtcgagagtgtggtgggcgcacggtctacgccaacacgggccttcatttccccattgtgtcggtcgagaagcttgagcagggtcatctgtatgcccgcattaccctgaaacatgtccctgaccgcggcggcatcgaagtcctttttcctttccatgagggaattgaaggccgagtgtacggcaagcagtagcctctctattttttcattggtttccaccgctttccggcttttgccgttcagccgactctcacgtgcgttccatagctcaggggtacaggatagcttgcagctgaactgcgccatcgtgcggttgagggtgatccgtcccatgatcggggctttgccgttcttgtccggctcgctctttttcaggtagagcagtaccttaaatttttccactttcataacgctcttttttaggttgtaaaaatactcctttgaaaagcgccctttggcatgcaaaatattgatgaacagtgaatacaaatccgctttgttcttatcgataaaaatcggttacctgtcgtcgtttcagaaacaggcggctaacagcctggtaactgaaacgctgcaatattttgttttcttttgcaggccagcctattctgcaattctcgtaaagtgcttaattataaacgttttacgttttatactcgccattccgttttttactgcatttctaaatattacttacactgcccggcatacttgggctacgacggcttattattgcgaaattcatccgggtattatctccgaagctatgggacattcgtccatcactgtaacggagacatatctcaagcctttccgaagcaagaaaattgatgaagcaaataaacaggttcttgattttgtgaagcgttctgtgataggattaaatgcctgattattattctgttactctgtaggtaacgggaataaatgacggtgcaaatatgagcatatttcttaaaacaaccaaacgaaatcacacattttttctaataaactacttaaaagcggaactaggacagataaaacacgtggattctttgtattagggctttgttaacttctaaatattgcataagatttccctcccctctgccgctcgtcagaagcaggggtaaagaactttcataatctatcgtatcatttctcagtattgactactctaaaagagcaggcgcaaaggtctctccgttacctacagagtaacgggctgtctattattgaaacttagtgtttaataatatattattaatgtaatttttaagtagttatgaaaagaaaatttgtaaaagtgatgttcttcggggcgttggcactttctactgtcacctatgtaggttgtaaggactacgatgatgacatcgacaatctgcaaacacagattgacgcaaacaaagctagcattgccgagttacagaattttgtgaaagaaggcaaatgggtaaccgctgtagagacaattactgatggatttaaaattacttttaacgatggtaaaagctattctatcgtaagtggtgccgatggcgcagcaggtacaaagattgagattgattcggcaacaaagaactggattattgatggaaaagacaccggtatttgttctgaaggaaagaaaggtgataagggagatcaaggtgaccaaggtgaccaaggcgataaaggtgacaaaggtgaagatggatatgcaccgcaaatttcagaagacggatattggatggtttgggatgcagaagccggagaacctaaaaaaacagatgttaaagctgctacagatatctatgtaactgctgatgctaataatccattggtttgggttttgaatatactcaataaggaaacgggagaatgggaaactgtttctatgcctaaggctgctcgtatcactagtatgcgtgcacttggcgaacaaggtggaagtatcgatttttcttctactgaggcaaacgctaccttgtattatggagtagtaggaaaagatgttaaatttaacggaaaatcttatccaaaaggaacgttcctgtctgctagaggtagcatgattcatgcattgattaatccggtgaacttggaggttaaagatattcaatcttatgaaatcggcttgactgattctaaaggaaatacaaactttgttgtagctagtattgcagctaatgttagtgaaactgctttaactcgtgctgaaaatacagcaaataaaggtatctatgacttgactcttaaatttgctgaaggtatagatccggataatttgaatgaaaatatcgcttatgcacttacaacgaaagatgcgtgggggaatgaaatcatctccggatatgatgtgaaagttacagctaaagaagaagaaaagacacttgtagatgtaaataaggatgtagatttcaaagttactcataatctggatgaattggttggtgatcaattgaatgatgtagtagattatacttattcagttgtcgaagccgatgctaagaaaattgaggctacatttagcaaggaaaataaaacaattattgctaataaggaaggcaaattgactgttactattgcctattttactactgctggaaatgaaaaagaagctaagttgaatttgacattcaagtatgcagctgaaaaagcagagattaaagatatgacttgggtcgtaggtggcgaaaaagtaacagctacttctgaaattgttggtccttcagtagatgtaatcaaagcaaatataacagctggtatagatacggaaatcgcttatactgatggtaaagttgaaattaacggagtgaaggatttggaatatgaaggtggtattactttgaaactggtaggtttggacaaagacggagaacccgtagctgatatgtctacaggtgtagctgatattactaaatttgtaatcgaagctacatttgatcctgctgaagttgctgctgttcctcatactgcaacagttaaattcaaaaatgcaactccgactccgggattggataatgatgttctgtatgaaacgacatttaagattactgtagaccagcaggatagtaagttgtttgaattcaaacgtgcaggtgcttactttagtggtgataacgctactgcttatggtaatgtaaatgatgaagatgcagcaggtaagattacttacaatctttacaaactgtaccaggaaggttctatttctgctaaagagaaagcacttatttcatttgatgaggaaataccgtccaaaatggtagatgatacaaaagtctatgctgatgcatggttgtcctcaaataagagtagcgatgagatcacagttgcgccttatgatgcttggggtggtgcttatgaaggtcgtaacattacagtagcttatgctccgtttggaaatgaccgtctgaatgttatcactgataagtttaatttgactgtgaaatcggaaatcttcgaaggtacatttaagtatattggcaaatcaggtactgaagctaagccatttgaagtagatggaggacatacacaagatctgttagctaaagatttcgaaaaaacagatgcttatggtgttggctatgactttgatgacaagagaattaaatctgttgtacttgaattggcaaaccaggatgctaaagattatgtaacattaagtgctactgactttacgaaaactgacaaagttgtaatctctaagaaagcttctcaaacacctatcgttacttctccggtatgtgaagtaaacgttatcattactgataaatggggtagacagactactgaaactgtttatgttaaagtgttgaagtaaaccggatttaaaagatctgtaattgagggcatcttaatccttttaagattaaagatgccttctataatatataatcaaatcttttgagaagaaatatattcagggatagactgaaaattatgcttatgaaagtatattctcaaatgtttatctctagaagggatgcctcccttatttcccacggacatccctttttatctctctcttaagacatcttacttattatactagaagcaatttgctagtcccttatttcctatagataaggagatgttttaagaatacaaaaggctcgagcttgtgaaagttcgggcttttcatcgttatggtgcattccaaaacatctttatatttcgttttgtttgtatgaggtattctttttatgagaatacttgtatctttattatcaaattaatcaaaacaatcgtgagatgtcaaaagtattaggatttatgaagcaagtggcccgtgggttacaagtggagggaaactttggaactgctcatgtctatcgcagcagtctcaatgccattattgcttatcgtgggaaagatgattttgccttcaatgaggtaacttcagagtggttaaaagggttcgaagtttatcttcgtagtcgtgggtgtagttggaatacggtttctacctatctgcgcacttttcgtgccgtttacaatcgtgccgtcgatcttcatcgggcaccatacgttccgcatctgttccgttcggtgtatacgggaactcgtgccgaccataagcgggcattaagtgacgaagatatgaagaaagtttttgcggacttgtcccgttcgtccggggtgtctttaggattacgacgggcgcaggagttttttattttaatgtttcttcttcgtggtataccgtttgttgatcttgcttatctacgtaagagtgatttacgtgataatgtgatcacgtatcgtcggcgtaaaacaggccgtcccctgtcggtgacgttaactccggaagcaatgattctggtaaagaaatacatgaaccgtgattcttcttctccttatctctttccttttttggaaagccgtgaaggaacgaaagaggcgtatcgggaatatcagttggcgttacgcagctttaatcaacaactaatgttgttaggagagttattaggactaggcgataaattaagctcgtacaccgcccgtcacacttgggctacgacggcttattattgcgaaattcatccgggtattatctccgaagctatgggacattcgtctatcactgtaaccgagacttatttgaaacctttcaggagtaagaaaattgatgaagctaatagacaggttgttgactttgtccgacgatcagccggtggattaatatcttgataaatagcctgttacttcataggtaacgggaataaatatcggtgcaaatatgagcatatttcttaaaacaaccaaacgaaatcacacatttttttaataaactactcaaaagcggaactaaaacagataaaacacgtggattctttgtattagggctttgttaacttctaaatattgcacaagatttccctcccctctgccgcttatcagaagcaggggtaaagaactttcataatctatcgtataatttttcagtattgactactctaaaagagcaggaacaaaggtttccctgttacctatgaagtaacgggctgtctattattgaaacttagtgtttaataatatattattaatgtaatttttaagtagttatgaaaagaaaatttgtaaaagtgatgttcttcggggcgctggcactttctactgtcacctatgtaggttgtaaggactacgatgatgacatcgacaatctgcaaacacagattgacgctgtaaaggtgtcactcgaggagttgcagacaaaggttaacagcggttccgttataacaaatgttgtgaaaggagagaacggaattactgtgacgcttagtgacggcaaaagctatgaactgactaatggtaaaaatggtgcggatgctgatgtttggacgattggtgagaaagatggctattggtacaaaaatggtgtgaaaaccgaatataaagctgtcggagtagatggagcacccggtgctgccggaccggctggtggagaaggtacacccggtgaaaacggtaagtactatgtacctaacaaagaaactggctgttttgatatttatcaggatggtaaattggtagaagcaacagatattagttggaaaaccgcagcatctgaaggtggagttactgctgttcttaatggtaatgtattgacacttcaaggagttgaaggagcaccggatggtatagcaatagacatcacttcaggcattgctttatcttctatcgcattcattcctgatgtagtaagtacagatgttccttatgcaactactagtaagcctttctatcatatcgagagttatttaaatgaagctaagtttaatactactagtggcgaattcattgcacagaaagattggggtaaatcaaatgttgtggcattgaattatcgcttgaatccggaagatgcaaatgttgacggaaaaactgtattcggctttatcgatcgtaaagtgaaaacccgtgcagttggtgacaagaaagtgttgctgaatgttgacgagacgaaggtggcggatggtgttgtaactatcggaacaacaattaatccgaatgcattggctcaaaatgctgaatataatattgctgctttacaggcatggtatggtcaaaaaccaatgacatctgattatgtatatgctacatctagcgagattgacttggtacttgctgatagcgtaaaaactaaggaaggtgacgatgctgctattactttctatgagcgtacaaaatctatcaataaagatggtgaatcagatgatttcatcaaacagtttgttgcattgaacgctgctgcaaacgctacatttaaatatgatgctactattaatttgaaagattatgtaggattgtattctaatgataaagataattggttggcagcattgggattcaaaggcatgagttatgaattctcaatacctgagaactatttggctgaagatgacgaaaagacaaatcaacaatggtttatcgtaaaagaaggagaaaacattgccggtaacggtgttattaaagttaatcctgaagtgaaaaacggaactccggctatcggacgtactcctgttgttagagtagacgctttcttaactagcaatgcaggtgaaaagaaactcgtagcttcatcttatatcaaattggagattacagaaacatctcaggctccggacgaaaaacctgattatggaattattgatatgtctgctgataaagcagctgattatcataagttagaaggtgatgaaaaagcattcactaatgactataatcttgataatgtcagcatggactatcaggctatcaacaataagatttacggtactgcaaaattgacttctactacattctggaattattatggtggtgatgatcataaatataatgtattggttactgtaactgacaaaaatggtcaggaactgactattattgatcaagaggcagaacagagtacagatgtagtgataaatgatgaatcaggtcttcttctgaatattaaattgaacgatgatgcaaccaagacatctgctatcaaagtgggtatcaataatctgatcaagactcagaatacttacaaagacgtagacggtaagggtgctaaatactcagttaagattattattccttctaatgatacatctcatggtgatattgtacttcaacaagtattctatgtgaaggaagaatgtgttgcttatacttataatcctttgtattataacgagacatataagtctcttgctgatggaaagacttataaggattgtattgtagtcaaaggacaggaaaactccggttgggaaatgtcttctgtagtgagcgagcattttgaaaataatgaagcaggtgagaatatcttcacatactataataaagttaataatgtaaaagcacttcagttccaatgggcttctggtgtaacaggtgtatctccgtctcctctggcttcattctcaacagatcagacagttaagttgactgagccgatgaccgaacgtgatgatgttaagaacatgacttatcaggtaactttggaaaatggtgaaacatgtgattttgcatataacatcgtattcattaatccgtttgttgctacaaaagctaccggcataaagatctttggtaatggaattggtgtaaacaccggagccactatgcctgaagttcttgtgaaggataacgaaggaagcgctatttactcttatagctctactgctactacattagtgttgagtgataaagctacaaatacttataaactgaatgctgacatggtaagtgttgaatatgctttcgttgaagaaggtgattgggctatacttgacaagaatatgtctgcaaattcagagttaaaggttaatgctactacaggtgtagttacttggaaaaacgaaggttctactttgactagagattacaaccttacggtaattgcaactgtgacattcaaagatttgtcagttgtaaaatgtgagattcctgtaacattgacagaaaaagcaattaaataacaaagtcatgattctcttataaagaaacttgatttgtagataaattacggaggacgttccagtaaacaaacggggcgtcctctgttttgagttgaattatataataaatatgaagattaaatatcacattctgttggttctattcctgacgtacgttaatgttgcctttgcttggcagtctggttacacaaaagaacagttttccgaaaaagaggaaggaaaaactgagttcaatccacattggtttctgtctctgcaaggaggaggtgcctatactttaggtgaagcgattttcggagatttggtatctccgtccgtagcggtagctttgggatataagtttactccgttgtttgcagttcgggcagaagcaagtggctggcaggctaaaggaggttgggtaaatccggcaattacttataaatataaatatttgcagggtggcctagatgctatgtttgatctaagtaacttgtgttatggtttccattcaaaacgtatattcaatgcatatctttttctgggtataggcttgaatggcgcttttgacaatgatgaggctgtagctttgaacgcaagcgggtacaatttgcaacgtttgtggacaggtaagaaactgtatgcttcaggacgtatcgggctggggacaaatcttcgtctgaatgatcatgtggctatcaactttgagttgaatacaaatatgttgtctgacaagtttaactctaagaaaggtgtgaatgctgattggcaattcaatggattggttgggctctctttcacattaggaaaaagctccaggaaggtggctcctgtttcttatgaacccgaacaacctgtttctgttacgacagtggagcagcgtcctgaaccgattccggtagtggagcaatcgaagccgaaggaagacaaaatagttgtagaacctatgaagcagaatattttcttcgctttgaactctgctcgtattcaggatgagcaacagcaaaaaattagctctttggttgagtatctggagaaaaatcctgcggcaaagatttgcataacaggttatgcagatgtaaatacaggtaatgcaacaataaactttaagttgtccgaggctcgtgccaagaatgttgctgaagcattgaaatctaaaggcattgcggcagacagaataaaagttgacttcaaaggagatacagtacaaccttattctactccgaaagaaaatcgtgtaagtatttgtattacagaatgaaatactataaaaggaaacagctgaatggagatgcttgtgaaagtgtaccattcaaatcactgttccttggaagggatgcctcccttatttcccacggacatccctttatagctcttaaggcatctcacttattacgctagaagcaatttgctagtccctttttccctatagataaggagatgttttaagaatacaaagagcccgggcttgtgaaagtccgggcttttcgatattcatctatcaggcttaatcagcagaaagtctttatcatacaatcccacaagtaaactttctcctttggcgttcactttcaggcctccgtatgttgccttttgataaagggtgtcttgaccttcttcaaagaagaaagattcggcaccaagaaataaacgatcatttacaattttatagttgatgatcagttcgttatcgttcaaaggttccaatgcatccttaagtcggacaatacgggctacccggttactgtcgatatttaatacggcatatccatgtgtagctacttgtgtatcgccgagtaagtccgatgtagcttctctataacggaggctcatgtaatcaccttgcataagtgaacgagggtcgacgggagccagttcaaacaatacgagttgaccgtctctcagtgtttgttctttctggtaaatggaccagttgaggtatcctaacaaaagtaacaggttagtgataatcagtatccgactctgttttttcatgtttcgttcttttttgagtgaaataataccaagcgatcatgaatatgattcctgtgaagaaaagcgtgattgacttcacaagcaggcttaggttcaaatcatagtagtatttggaaacggcatagataaagagtaggagtgcggcggcacattctgctttatagccataatgaaaacatatcagtatcagtaagagactacccgacagatatggggcgaacattgtcggcaggcagataaggatacagagaatgcatattccgatctgacttaccgggttcgttacttccattaccggcatgatacgttgaataataagaagaatcccgatccagataaagatagatagtaaccaatagggtgcgggtattccataattaacagacaatccggctaataagcagatacaggaaacgaataagccggaatggaaaggtgtgtatttggaaactaagttttcctttaatccggtcaggatattcctttcgtatagattggtgaacaggaaaactgctaaaaccgggactactgctatttgcaaaagttgtattgacgaagataaataagctaactctccgagaaaagaaataataaatagaatgacagaaaggaaaggtaagatgaaacctttcgataagaagaaagtgaaaatgccggttatcgcaagtgcaataaagagagcatttgtacttttgtttagtccataagcaatcagtgcacatccggcgatgtacagagtgatattcattgcatccagaaaaggaactgtgagccggcgacttattgtcagggtagtaatgatgaataaacatccgattatcagactggatgtttcagtgcggataatcgaggcaactaccagaaatcctaaaaagaagatagcagtcaggattcctccgataattgacactacttggattgtcaggttattcttctgtgccataccattgcctttttaggtggagaataaaatatataatcaaggtcgttcctgtgataacgataattcctgcaaagagaaacagattgacatttttgagattactgtgtgatataaaggtagtcagcaggatcattagagttgcaaaaggaatggtagcgagataatacagattcttttgttttcggccgaaccacaatcctaccgaaaacaaaagaatggtacttgctaacgggacggatagaatggtattatcttcacagatagctgccattgtaagataactggtatgtataattgtagccaacgacaggaagctgatcagccaatggtttcgtttattcaactgcccttttatgttcattcgctccgcaacgatcgttgatgtggcgcatatccaggttactgcgctggtgagcaaagcgctggtccacgaatgaccgggtactatttgtattacatacagccatattgttatactgagtagtccgataaatgtcagccacaacggggcgaaacggatagctactgcccaaagaaaggtaaaaagtgtccacccgaggaataggtggtatgcatcggctccggtctgatagatttgcccgaatacggcaaaaagcgtacctgtcagaaaggttgctccggtaaggagaacctgtttgacgagcgtattccaccgagtgaatacggcgagcaggacagaggctgccagtaaaacttctaccattcccagtttggcgaatttggggagttcatcccaattgtaggcaaagaagaagataatgcctgttactgtaaaaccaatgcctgccgctaacaagaaaatggaaagaaattgattccattgtcttttattcgcatagagagcttgccggggcaaaggtgaaaagtctgacttttccatgtgctttatactttttgatgattacaaacataagaaaataaaatgataatcaccttacccgataatctaaaatacctcccgtatatgtttatagttagaattgattgtgtcaataacttcttgcgaacgcccgttgattaataacttatacattgactgggcaaagcctaccatttgtccgaactcaattttgggaggcatggcgagtgcgttcgggtcggtcataatattaacaagtaccggaccgtccatttcaaaggcattgtatagggtcgttaatacctcctctgggtcactgacattgaaacctgttattcccatcgcttccgctacttgagcgaagtcgggattcaacatatttgtctgccagtccggtagcccgtcaacttccatttccagtttcaccattcccagcgaacgattgttgaatacgataattttaatcggcagtttgtactgaaccaccgttgccagatctcctaaagtcatagacaaacctccgtcaccgcataatgcgactacctggcgttcggggtaagccaaggcagcaccaatagcctgcggcaaagcatttgccatagaaccgtgattgaaagaacccagcatgtggcgattacctgtcgcttgcagataccgcgctccccatacgcaagtcatccccgtatctactgtaaatacagcgtcatctgaagaaagtttgtcaatctccgacatcacgtattcgggatgaatcttattcacttctcctttatctttcgtgtaggcagctaaatctttctttacctcttcgtatcttttgagctgtttcaacaggaaagtatcatctgttttcggggtcagcatacgtaataatgcctgaatagtcattttcacatctccacaaagtccgatgtctactttggcgcggcgtcccaggcgttcgggctttatatctatctgggctattttgatatcatcgggcaggaaagcagagtaaggaaaatccgtgccgagcatgagaagtacttccgcttcgtgcatactgtaatatcctgaaggcattcccaataatccggtcattcctacctcgtacggattttcgtattgcacttccatttttcctttaaaagtatatgctaccggggcattcagtttctcggaaagggcaatcacttcttcgtgcgccccacggcaaccgatgccacagaataaggtgatacgttcatgactgttcaataaatcggccaacagtataaggtcctcttccgaaggacagacttccggccgggtgaaatagttccggactgacgaatcgacagaaacggccgatgcctttgccagatctcccggtaagccgactacggctactcctttacgagtaatagctgtctgaatggccgactggagcatacgcggaaattgcttgggagtagtggctacttcattataataactgcaatcattgaaaagcttgattgtattggtctcctgaaaatattcagtaccgaattctctgcttgggatagtggaggcaatagctatcaccggtgcacccgaccgttgtgcgtcatacaaaccgttgataagatgcacgtgtcccggaccgctgctaccggcacaacatcccggacgtcctgtcagttgcgcttctgctgcggcggcatacgctcccgtttcttcgtgccgcacgtgtatccattttattttattattcttcctgacagcttcgtttacttcattcagactatcgcctgtcacggcgtaaatacgttccactcccgattctgccagagtgtctattagttgttctgctattttctttgccatatctgtaataggtttaggattgattctctgataataacagatgtctgcaaagaaaagttctattttaacatacgctaataccggtattgtgtcggtacacatcgcggcttttatgttaaaaataaattagtaacaggtttttggtaaagtagcataaacaaatgtaatgtccttttgttatctttctaggtaaaatcttaacctaatgttttaaacctctaaataactctagaaaaatggacagaaatgaaatcggtttgaatgccggtaaagtttggcagctgcttagcaataatgagaaatggggctacggaactctgaaaaggaaatccgggctgaaagataaagagctgggtgccgctttaggctggttatcaagagagaataagatagagtttgaccaatgtgatgaagaactctatgtatatctctgtgtaaatgtttacatcggctaaaggagtttggtacttgctgaaaacaaagaaattcccggagtggtaacgtgtagttagtgcgtcggggatttttgtttttagatatatcttcgtgctacttgatttttgaaaataaatctgttactttgccatccaatttaaaatgtaaggaaacaatgagaagttttgcctctgataataattccggtgtgcatccgttggtaatggcagcgttgaaccgggcaaacacagaccatgcattaggctatggagacgataaatggacggaagaagccgttgcaaaaataaaagagacttttacacaagactgtgtgccgttgtttgtattcaacggaacgggtagcaatgtggtggcgttgcagttaatgacgcgtccgtatcattctattttctgtgccgaaacagcccatatttatgttgacgaatgcggctctcccgtgaagatgacaggttgtcagattcgtccgattgctactcccgatggtaaactgactcccgagctgatgcgaccttacttgcatggtttcggtgaccagcatcattctcaaccgagagccctctacatctcccaatgtacggaaatgggaactatctatacgcccgaggaactgaaacgtctgacggactttgctcatttgaacggtatgtatgtccacatggacggagctagaattgccaatgcctgtgccgccctccggctttcttttaaggcgctgactgtggattgcggagtggatgtccttagtttcggcggaacgaagaacggactgatgatgggggagtgtgttattgtattcaataaggacttgcagaaagaagcccgttttgtccgtaagcagtctgcccaactggcttcgaagatgcgctatctctcttgccagttcaccgcttatctgacggatgaactttggttgaagaatgccacgcatgccaacgtaatggcagctaagctttacaaagagttaaagaaactcccggaagtaacttttactcaaaaggtagaaagtaaccagttgttccttacaatgccccgtcctattattgatagaatgttggaatcttatttcttttatttttggaatgaagataaggatgaaattcgtctagtaacttcttttgatacaacggaagaagatgttgatgaattcattcgacttttaaaacgttaaaagggaaaaaggggacaacaaaagcccacataacgctgttgtaataagaagtttgaaactaactttgtctctagagttttcaacttcttattatatatgaatactagacagaacaagctaatcttattcgcactattattattgacacaaacctttattagtgcgcagacgcattctactaaaatagaactgccggaagactctatatctgttgcggccgttaacgattctgttccggcaaagcgcagcttcttcaagaaattccttgactacttcaatgacgccaacaaggagaaaaagaataaaaagtttgatttcagtgtgataggtggtcctcactactctagtgataccaagtttgggctcgggctggtggcggcaggcttgtatcgtaccgattctgctgatacgattcttcctccctcaaatgtttctctttatggagatgtgtcgactgtcggcttctatttgttgggagttcgtggaaatcatttgtttccgcaggataaatatcggttgaattataacctttatttttattctttccccagcctttattgggggagaggatacgacaatggggcaaactccgataacgaaagtgactataaacgttttcaggcacaggtaaaagtcgattttatgttccgaatggcaaagaacttttatatcggtccaatggccgtattcgactatattgacggacgggatttagaaaaaccggagctttgggaaggaatggcggcacggacaacgaatacgagtctcggcctttcccttctttatgattcacgtgatttcctgaccaatgcttatcgtggatattatctgaggatagaccaacggttcagccccgccttctttggtaataaatatgctttcagcagtacggaactgaccaccagttattatcaccctatatggaagggagggatattggccggacagtttcacactctgctgacttatggagataccccttggggattaatggcaacattgggaagttcttattcgatgcgcggatattatgaaggacgttatcgtgacaagtgtgctatggatgcacaaatagaacttcgccagcatgtctggaagcgaaatggggtagctgtatgggcaggggcaggaacaatcttcccggaattttctgcgtttactccgaaacatattcttcctaattatggttttggttatcgttgggaatttaaaaagagagtaaatgtacgtttggatttaggttttggtaaacaccagaccggatttatttttaatataaatgaagctttttaagaacataaagaaatggttggaggatcaggaacatctgttttacttgtttctgttcatcctgattgtacctaatattgtgctctgttttacggagccgctgtcgtttatagcaaaggtctgcaatgtcctgttaccttttggatgttattacctgctaatgacactatcgagaaattgcggtaaaatgctttggattttgttcctgtttctctttttcggagcgttccagattgtgttgctctatctgttcgggcagtccattattgctgtcgatatgtttctgaacctggtgaccaccaattcgagcgaagctatggaactgcttggcaatctgacgcctgccattgtcgttgtggtgatactgtatataccggctttggtgttggctaccatttcaatcgtccgaaaacgaatgttatcggcagcgtttatccgcagagaacgtaaaagggctttcgtcgtcttcggagtctcccttctcagccttgccggggcatacgtacaggatcccggctatgaactgaaatcggacttataccctttgaatgtctgttataacgtagggcttgcttttcagcggactgccttgacgcagaactatcaccacacttccaaagactttaccttccatgcccaagctacgcatccggaggagaaaaaagaggtgtacgtgatggtagtgggcgaaacctcccgtgcattaaactggcaactgtatggctatgaacgggaaacgaatccgttgcttgtccagcagtcgggattggttgctttcccgaaagtgctgacagaatcgaataccacgcataaaagtgtgcctatgttattgtctgacgttactgcttgcagttatgactctatttaccatcggaaaggaatcattactgcctttaaagaagcgggcttccggacagcttttttctctaaccaacgttttaatcattctttcatcgactttttcggaagggaagccgatacctttgattttataaaagaggattcgttggatttttcctataatccttctgacaatgaactcttgaaattggtagagcaggaactggccaaaggtgcaaaaaaacaatttatcgtccttcacacctatggttctcatttcaactatcgggaacgttatccgtcgggagacgctttctttacaccggactatccggttgaggcggaaaggaaatttcgggataatctggtaaatgcatacgataactctgtccgttacacggacagcttattggcacgccttatcggtatgttggagaatcaaggtacagatgcagccttgatttatacatccgatcacggagaagatatttttgacgatccccgtcatcttttcctccatgcctcacctgtaccgtcctattatcagcttcatattccgtttcttatctggatgtccgacagttatcgggaaacctatcccgaacactgggaagctgtgacggctaataaagaaaagaatatttcctccagcagttccttctttccgacgatgctggacttgggaggaataaaaactccttaccgggatgattcgcaatctgtggcaacccctctttataaagtgaggccgagagtctatctgaacgaccataacgaacctcgtccgttggatgatttagggatgaagaaacaggacttccatatgttggaaaaacaggaaatcaacacctaaacttaatacttgctaaaattttcatccaaaagacagattggcgtgttatttgcaatatgatgtatgaacgattaaattcataaaacatggcctatatagattattacaagattcttggagttgacaagagtgcttcacaagatgatatcaaaaaggcttttcgtaagttggcccggaagtatcatcctgacttgaatcctaacgaccctagtgcaaaggataagtttcaggaaatcaatgaagccaatgaggtactgagtgaccctgagaaacgtaaaaagtatgatgagtacggagaacattggaagcatgctgatgaattcgaagcacagaaacgagcgcagcaacaggccggaggctttggtggtgcgggcggctttggcggattcggtggcggaggacaaggtttttccgatggtaacggaacatattggtatagctccgatggagaaggcttttccggaggtaacgccagtggcttctctgacttcttcgagtcgatgttcggccacaggggaggcaagggacaaggtgctgcgggattccgtggacaggactttaatgcggagcttcatctgtcgcttcgtgatgctgctcagacgcataaacagatattgaccgtcaacggtaaacaggtacgtatcactattcctgccggtgtagccgacggtcaggtgattaagctgaagggctacggagccgaaggtatcaacgggggacctgcaggcgacttgtacattacatttgtcattgccgaagatcctgttttcaaacgcttgggcgacgacctgtatgttgatgtggaaatagatctctacactgccgtattgggaggtgagaagatagtcgacactttggacagtaaagtgaaactgaagataaagccggaaacacagaacggtacgaaagtacgcttgaaaggaaaaggattcccggtttataagaaggaaggacaattcggtgacctgattgttacctattccgttaagattcctacgaatttgacggatgcacagaaggaattgttccgtcaattacagagtatgaactaaaatgaatgagtaccatgcagaccgaattaattattgtcagtgaatactgtcacaaatgtcatattgagccttcattcattgaattgttggaagaaggcggtttaattaacgtgcacactgaaggtagtgaacattatctgctcgtgtccgaacttccggacgtggaacgttatagcaggatgtattatgacttgtccattaatatggaaggcattgacgccattcatcacttgttggaaagaatggaggagatgaaacgcgaaatggactcactccgtaagcagcttacgctataccgcaaacgggaaatagaagatactgactggtagaaaaatagagcttctgtttgtactaaacagaggcttcatttatagtaaacagaggctctgattcactcaatcagagcctctgttttaataagactgttccgggagaatatgactatcggagatatgtacagatttcttccagatagtgcgcatcaatatcatcgaaactatccaatgaatcactgtcaatatccagcactccgatcacgttcccttctttcatcatcggtacaactatttccgatttggaatcggaactgcatgcaatgtggccgggaaattgttctacatcaggaacaatcagcgtatgtgcttctttccaggccgtgccgcaaactcctctgccaaaacggatacgagtgcaggcgataggcccttgaaacggacctagcacaagctcatcgcctttcaccagataaaagcctacccagaagaaattgaaagtctgctttaatgcggcggaaagattcgcaagattggctatgaaatccgtttccgtacttattaatgcgtataattgcgggagtagttcacgatacttttcctccttgcttcccgcgttgattgataaattttctgccatatcggttgttacttgatttgatttaatatacttggatcttttatcttgtcgtcttctgcaaagaagataatcttcgtcagtatttcagccgttttcgggtcctcatccacaaatggcaggaacaagcgtccgcggttttgtgaatgtaccgggagaacggcaatctgtgcgcctccttcctgatgaatcacaccgcttcccaagtgaatgttgtacttgcccagcttgccctcgatacggacaaagttgccttccaccttcacattgttgaaatggaacaacggcattgtcagttccaccaatacgctacgcatttcgatcgtagagtgactggtttccggatctacacttccggcgtgcgccacgcttacggcaaggtctacatccctcattacttcggagaacacaacgggaggaatctccgaaatcttcatgggcttataatcctttcggttgtagaaacaaacatattccaacgtaggagcttcgatgtcggcaggcgagaaccaatcggccattgcgtaaatattggcaatgatattctctttgtaatagatcttttgaagtccgtcctcatagtcggctacccaacgacgtcccttcagtacggcaattgttttctgcggttgaatctggttgccggcgtagcggcgggattgtgttgcttccgcctcttcggaagtaggaacgtagagctcgcggaacacctgtttgaaaggttggcggattgctttatcgaacaggaatttctgatatgcgtgccagttgccgcttgcatacaagtcggtggggtgggcgatgcgtaactcgtctttcgcttttaacgggaggcagacggcgtttgccgtcaccagcaatccgtcagtgtagaaacctgtttgtccgttacagataaagaccagatgtttcagcaacggccatataacgggattttgcatcagcttgcgcaactcgctttcttcaaaacgggtacagtcttccattgcttgctccagcataatgcgcgaacgggtatactggtctttcagcttcttatgcaccgctttcagttcttctacatacggatgttttttcagtttggcgggcatactgttgagctctttgcccgctttgatctgcttgatctctggcttgccttcttcgctgacttgcacgtatacttccacaccgtctatctctttgggagtcaggtaagggagcagttctttaatcagctccgtttccatgctccatgtcaggcgggtgacgtctccgtagccggaattacgtgcaaggttttgcagtgcgatgctgacggctttcttttcgctttcctgtctttgtgcaccgaattccttgctttctttcaagaacttttgcaggtattggtaacgttccagcaattccttgtctgctttgcgtcccaatgggatcagtccgtaactcatcaacaaatccttgttccgtttggcaatgatttccttctttacatctgccgcctttaccgtgccgctggttgcatcggcaaacttgcgggcacgggtgtggctgttgctgcatgaaatatatttggcggcattgtagactacttcaaagcgttgtttgccgatagtcttgaatgcatctttgaaccagtcaatatcaaatgcgccttcccggaggtcttccacatcaatcggggtatagcgggcgataatcgctttctttttgtcatcgcaggtctcattggtatgggcatggaaataataagctgcgcttgtcagtcccttccaattgatcgccttctcggtaagttctatccattgcggggcgaacatggcagcttctaccagtcgttcattgctgatttcagcctgttttgcaagctttttcagttgggcactggtgtctgtcggcagtggatagcaggcgtggagcaggctgctcaatactccgcgtttcgtattgttccagttatagctgtcgcgaatgaaggtatctttgccgaatgcctgcaggatgccgatgaacgttttggctccgtagacataagacaattcttcggcaagactggttacctgcgtttcggaatctccccgtttcaattctatttccagaatcctgtcgaccaccttttgtgccagtgaacggaacagagagaagtcgattcctttgatatcggcatacctttctttctctttattgaaacggaaattgtcattcaatacttttgtgatagcctctacgcggctgggggagttgacacgtcccatcatttcccggtaaacttcttcggccggaattaatcccagcatccatgctcgggcgaagtccgtagcctggaggtaagagtccgtttcttccagttcgggtgtatgctccatgtaattggtgagcttgtagagctggtagcgtacggtgaagtagcggacgaacagatcatcgctgatcggcttttgaggtatttcgagccagaagttcacaaacttgttgttgtgtatcgggtaaacgatttgtttctttccgtattccattttatccctgagccatgcgtgcttgttggtatattgacggaaaatgttttctgtattcagcaatggcaataattggagaagcatattgacggataactgttgataggcagcttcatccctgtattcatgagccagtgcttcgatgatatcgttaatctgatcgtaatatgtcagcttgcggagttctttttgcagcccgcgatagacgacacctgtatacatccggttgataagcggatcgaagctattggccgatttctggtctgcttttctatcttcctcatcttcctcgtcataatcgtcttcatcctggggagttcctgtcgatgcaagcatgaagctcatcatcagtaatttgtcataactgcctatctcttcttcatagaaggctttccaaagttccggacgtccgagtccgctcaatcctccgtagttactccagtttatcaagacactattgcctatcaagcacgcttccccgtagctattcttaaactccgcgttcttatatgtttcaatgtatttattcagcttcttgaagatgagctttgcccttccgaagcagataagttcaaatgtttttctcacattgaatcctttgtccggagtgatttccggcaggttgacttccagggcagggtcgtacagtccgaaaccgttctctttcgtgtagtgctgtgtgactgtcttttccgttccgtcgccaatcagagactctatcaataccttttccttggcgttcggttttcggatttctttgacaacaggaagaagttcctgatagatatcctgtagaaattctgtattatggatagtcttcatcatatccagaccggccagacggcgttccaataccttatctgtcagtaagcggcggatactgtctgccagttgttctttcggctgtttcatcagcagattgatagcgttaatacgcatctcgctgtatttgaatcgtaacaattcctctaccttcaggttctgttcgggtgataaagtcatatcggacaatactttataagcttcgtcgcgtacatctaccgaacggtcaccgagtgattgaagtacgtattcttcttgtaattggctggtgggaggattcagtacaatgccgatatatcctgctctcatataagtttccagagtaggcagataagcacagagatcgtcccttaatgccgagtcatgcagcatccaggtgatgtatgccattttgagtacaatgtccgaacgggtgaggaatgcactttcccagaagaatatgtacggagagtaagtctctttggcagagattgactgatagacttgtttcaggtattcatagtggcggaccgcttcttcttttgtttcgaagtagtcgataagttgcggaccttcttgataattgccgtaccggctgagatggatcccgttcatatagagaggaagaatggatgcaaccaccgaaggttcgttgtgccatacttccagcgcttctttgctgatgcgatggttcatccctgtatattgcgtgcaacgcaggaaatagaggagagtttctacctgatatttagcaccttctttgatgatttgcggtataagtgcctgaatgtcttccgtattatagaatccgatactccataatgccaggtaaagcttggttgtgtctttgctttggagagcctcgcgggcgtcctcttgattattcaggaaatgccggatgagttctacatatttattggtgatacggtcactgctgtcctgttcgccgatacctgtactgactgctatgccgcgtttcacggaagcaaagcgttgaagtccgttgtcgtagataatggaaaataggtagaggtagctttcgggacagccttcgtccattgtctctacgatagcttgccggagtccttcttgcagtttggcagccaacaataacttcccttccagttcgagcaacggacggtatccgctggcagcgatagcttgaaggtgtccctgattcagacggttggcattgttttcgctggtcagcacgttttgcaagtactcaatgacggtggcatttccttccgctatttgggcagccatccaactctggcaactcatagcgtctttgattgtttctatttcttccggtgttcttcctccgttgagtatggcctgttcgttaaacccggttgcacgtagtttcagaaactgggtcagtgcatctgtcacatggttgagatgcagggtcgggtcaaccgaacgttgtgaacgtcgtgaatacccacaagtatacgggcaacgggccttgattttcaagtaagtatgaaacagcccggcatattcgtcccccaataagtagagaagtagtttatttagttttccgtcaaaaagatgggcgacattcctgatactttcctctcggatgatttcggtgatacaaggctccaattgctcgccatacgtcccgtaacgggtatccatatcaagatattgaatgaatacatcgaagagaacagccgtttctttatccagcttttttttattctttattaatttgtccacatacgggatgattcgtttattcaaatcttcattgtaaatgattctcatgattatctgttttttttgggttattatagatacttaccataatcttcccgatagcatagtcagtcggataaaggtcagtgtagtttcttcttttaatacaacaggagaagaaagcccgcctgcttccgtgtcatctataaagatacggaaaattccgtcctcataagattgcagcgcattgacgattgcttcagtttctgcggccggtctgccgttatagtttacttcgaagcctacctttccggaggcagccttgtcctcaacttcttcccgagtgagatattgcaatacttcactctgttgcatgcgatcgttatattcgcttacttgccagctgacaatacttgcaatcaactcctgcacattggtgggaggaacagaaaagtcgacgggcagcttttcaatgcagcactttcgctttcccagttgttttacttgaatgtatactctcattgtttactttatttggttatttgaatgcttgatacaatagcttccaagtctgcttgtgcttccttgtcgtagacaagcattactatggaaaagactcttagttgatcttcctggaaataacgtaatgcaatttgctgtacgtcatgccctggctcatcgggagctccgatatgcaatggattcgaggtctgtgtcatagacaggccgttgatcgttacgttgctttgtttataatcctccgaaggctctccatttgcatttctcgggagcaggagtgtcagttcttttacgcgttcaaactctttccgtgtgtcataggtaagcgcgacggcagttaattggtttcctccattgacgagcattagaaaaggaggttccgcagtgggagtcagtcctcgcgcacctgttatcttatgccagtttgtaggatattggcaactgaaatttgttgttgcatcatagaaagaaagccatgtgtcattgttgccgacaggggtataaggtggcatttgcagggtggacgacttgcttggcgtattcgttgcaggctggttgtcattttcctcttccagttcaccgttaagataagcttccacgattccgctttcccattccttacgtatttcccgatatgttgaagggatgttctggcaaagtccgaggaaactgaacaggaagattccgaagatccccagttcccctacaatagaaatagttctttgtgcatccttcttctcaaatctgtaactgattacataaatgattcccaaaagaaaaccactgagcaatccaccgatatgtgcggcattatcgattcctgctttcatgccatataccagattgtagcctacgaaaagaaggatactaattaataatgctttccgttgtgctctcgggatgtggtgaaaaaggaggaaagccagaaagatgccgtaaagtccgaagatcgctcctgaagctccggcactgattgtttcggcgtgcatataaagactgaaggctgccgaacaaaccccggtgagcagataggagatgaacatacgccgcgttcctatcaggtcctccaaccaaagtccgatatacatgaaagcatacatattcatcagcaagtggaaagcgccgatatgtatgaagttgcaggttatggcgcgccaccaatctccggtaagggttagcggtccaaaatcagccccccatttcagtaaggccagtgtggaaggttccaggattcccactccgaaagccaccattaagataaagatcagaagattaaggtccattaggataggagtcgctataaatcctttccggggaatgaagaaactgataaaggatgatttcttttctatttctttgagatatgcttcttcttcctcggtcaacggccggttaaaatcatcttccagttttttggctttttgctctaattcttccggagaaagagttgattttatttcttccattgccttctgcaaactttggatgttttttctgttcttgccatagtctaccagttgcatggcaatgctttgactgcgaacagatatttctccgtcacttccttcctgaatagagactgtaatttcctctccatgggattttatactcatagggacatcaaaacggacaccttcaagagtgagttctttaatattccattctaacttttgagaagcttcaagggctaaaatcagaatttgtgtgtttgataagccagcaaattgtagtgtgtcctcatgtaaaggcctgagtctaaatgccatattattctcttttaattgttgtaaatgattgcctatttcctgacagacaaatgtatggaataataatgagaaaaagtagaaataagtggggtatatttttatagatatagagaaacttaattgggtgagacatagccggttcgaacgaaggggaggggatatcaaacagaaagggccggatttgtccgcccgaatacgtaaagattatcatattcgggcaggcaaatccagcccttgcgttgtataatattctgttacttcttatagaaagccaagtcttctttatcgaagttgctgataaagttagcatgtttttccacttctgcttccgcatagttcagatatacgtgtgcagatttagagaacagttcggaagatctgcttgcatcctgaatcagcaggtgagacatgatgatgtcggcagccatttccattaatctgcgggctgtgaagtcgagcagttcctgatcttgtgcttctttcactgcgttggtacttgcttcgaacttatctgccatttttttcagacgagacatcagcggttccatttccggtgagcaggggatagcctcgaactcgcgtatagtagcgatgtaagagccattcgttacgtaacggatagcggctacggtctgcaactgagttgtaccttcgtagatactggtgatacgtgcgtcgcggtagatgcgttggcaagcatattccatcatgaagcccgagccaccatgtatctgtatacagtcgtaagcattctggttggcatattcggagttcatacctttggcaagcggagtgaagctgtcggccagtttggcgtatttcttctgttcttgacgttcttccggagtcagtttacgttcgcgggcgatgtcatccagtgctttgtagatgtctacgtagcgtgctgtttgatacagcagtgcacgtcctgcatccaacttacccttcatgatggcaagcatatcataaacagccgggaattcgataattgcctttccgaactgtttgcggtctttggcataagccaatccttcgttgtaagcagcttggctcaatcctaccgattgtgcggcaatacccagacgggcaccgttcatcaacgccattacatatttaatcaagccaagcttacggtcaccgcaaagttcagcttttgcattcttgtataccagttcgcaagtaggagaaccgtggatacctagtttgttttcgatacgacggacattaactcccccctgacgcttgtcatagatgaacatagacaaaccgcgaccgtctctggttccttcttccgaacgtgccagtacgaggtggatatccgcgtcaccgttagtaatgaagcgttttacaccgttcagcaaccagcagccgtctttttcgctgtaagtcgctttcagcatgaccgactgaaggtcggagcctgcatccggttccgtcaagtccatagacattgtttcgccttggcagatgcgagggatgaaacggctgtgttggtcggcattaccgaattcgtataatgtttcgatgcagtcctgcaatgaccagatgttgccgaaaccggcatcagcagccgctacgatttctgcacacatggtgtacggagtaatcgggaagttcagtccaccgaactgacggggcatggtcataccgttcaagccggctttcaccatggcgtcgaggttctgtttcgtacccgaagcatattctacacgtccgttggcgcagtgaggaccttcttcgtcaacgccttctgcgttggcagcaatgatttctcctgtgatttctcctgtgatctccagtactttgtcgtaagagtctacggcatcttcgaagtccagcggagcataatcgaattcatctttatctctgtaattgcgttctttcagttcgcaaatacgcttcatcatcggattgttcaagtgatatttgagttccggtatgtctgtataataattagccattgttccttacttactattttgtttataatacttaatcatcttcggtacaacttcttcaatcgttccgttgattacataatcggcaatcgtgttgatcggagcgtccgggtcgttgttgatagagatgatgataccactttcctgcataccggcgatatgctgaatctgtccggagataccgcaggcaatgtaaagttttggacgaaccgtgacacctgtctgtccaatctgacggtcgtgctctgcataacctgcatccacagcggcacggctggcacctacttcagcatgaagttctttagctaggtcgaacagcaagtcgaagttttctttcgaacctacaccgtaaccgccggctacgataatcggagaacctttcaggttgttcttggctttttccacatggcgttcgattaccttcactacataatccgtgtcggcaacgtatttcttcacgtcgtggcggatcacttctccctgataagtcggggagaggatttctttcttcatcacaccttcgcgaacggttgccatttgcgggcggtgttccgggtttacaatcgttgcaacgatgttgccgccgaatgccggacggatctgatacaacaggtttttataaactttgccttctttcttgtcttcgtggtcaccgatttccagagaagtacagtcggcagtcagtccgctggtcaaagcggaagaaacacgcgggccgaggtcgcgaccgataacggtggcacccatgaggcagatttgtggttgttcttctttgaaaaggttcaccaggatagcggtgtgagggagtgaagtataaggataaagtccttctccgtcgaaaacgtggagtttgtctactccgtaaggaaggatttgtttttcaatatctttgaggcctgttccggcaaccacagcttcgagctgacagttcaactggttggctaacgaacgacctttggtcagaagttcaaggctaacgtctgctacgttaccttcttctatttcgcaatatacaaataagttattcatgattatccgatagtatggttagctaacagttcaacaatcaggtcttccacgtcacggtcgctgccgctaatggttttgctctctttagcctggaacacgatgttctgaatggctttcacttttgtcggcgaaccggacagaccacattgtgcgaggtcaccgtttacgtcggctacgctccattctaccagattcaggtagtcgcgtttgtcatacaggtcagtataatcaaggttaccttgctgtttttcggtaacagttttggcatgtttgtacttctgcaccagtttcgcgttgcgcggacggcaaggagctgccgagccgttgacagtaatcacgataggcaacgggccctctacggtttcaacaccaccgtcgatgtggcgtttcactgtaatcttgtctttacctacttccagaatttcttctgcgtatgtgatttgggtcaatcccaacttttctgctacctgcggacctacttgcgccgtatccccgtcgatagcctgacgaccaccaataataatgtcacagttacctattttgcggatagcagtagccagcgcgtaagaagtagccagtgtatctgcaccggcgaaagcacggtcggtcagcaagtaaccgttatctgcaccacggaaaagtccttcacgaataatgtcggcagcacgacccggtcccattgtcagaatggtaacggtagagcctggatgggcatctttcagtcgaagagcttgctcgagagcattcaagtcttcgggattgaagatagcggggagtgccgcacggttaatggttccgtcggctttcatggcatccttcccaacattacgtgtgtcgggaacttgttttgccaatacaacaattttcaaactcatgttattaattttagtattagtatttctacaagtaggtagtagccagtagtcaagtagtaatctcttgctattcaaactatccggttaactatcagcgtgcaaatttacgcaaacacttggttctgacaagaaatccgagtaaaaaatgcacaggtttaaggattttgagcaaaagaagaaggatttttatagatttggttggggggtgaaagtatatttattgaatttgttcttgctcgatattactactgcttttctggcaagttgcttatttgcagagtggttaagcaggactttataggaaaggaaaccggtatagtactgtcggaatgccggtatagtactgttagagtgccttcatctttagtttgtcacggccgtggtaacttctttccacagccgtggcgaggtaactatatcggtatcccgacagaacaatacttattggttaacagaagtatagcggttgtataacgtatgtttaaagggggcttgtcacggaaggtaagtaaagccggacggacagtaactatgagggagtaataaaatcataggctgacaataaaatgtataagataatattgccagcctattgtcagggcttatcgtcagtgtctaatggaaatcaatatgctaagaatagaaatgatggtctgacaataagaactgctaaatttgtatgtaagtataaaattctttttttatgttattgtataccgatctcggccaatcctaatggttctccgtcatgtatcatcctcgttgctttcagctggacatagcgggctttgagtggggtgaagtagacagattgcaggatcgggttattctttatattagaaaattcgtcttttgctaccacttgattgacagcattgctatccataccgacagatatttcgtatgcggcgattacacctttattatattcgctttggtcgggaagataatggaatgaagtaatcgtacgttcttctcccaagtcgattaacagtgtgtttccattgacgaaacaggccgtttggtcattcttgtccatgcatttttgtgcttcttctgtgtctactccgctgagagtgaacgggaaactcttcagttcttccgcttttgtagagtatgtatcggaagttgctcctgcgtagaatgcttcgatgttattgatgcagagacatgcacgtgaatccgtgaaacggacacggagcttatcggtcgtgatcgtttcgaaacggaggagacgtttgtaaccaacggttgttgtctcttcattgagcttcacgggaagccattcaccttcctggttatattctactacgaatgatttcacacgttgtcccagagggatatattcctgtaacatcattctattgatcttctccggttgaggcaagtcaaattcaatagtggcggaagttacatcatcgttggtagcccaataagtatcatagtcgttgtctgtgacagctttagcggagaatgcttttccccgttcgtccgatgctttgggggaaaggccggccagcagattcttttctaattgtttctgtatgttcttatggaagttaacggcgttggcggagtctgtcggatgaatgagtccgtcacggtctacggggaagttcagcaataacgttgcgttatgtcctacgctacggtaatacaagtcggtcagttcgtccactgttttcacacggccgtcttcttccggatgatagaaccaacccggacggatagaaacgtcacactcggctgccacccattgattaccgtcagcatggccgtattgcagttcgcgatagttgggataaccgggataaacttctccggcacggaggaaagaccagttggtggctccggcaaatcctttctcgtttccgacccaacggcaaccgggtcccccatcggagaaaataactgcttgcggttgcagttcgtcaatcattttataggctcgcggatagttgtaatatgttttgcggtcgatagtacgtgaatctttcgctccgccataccagccatcgcctccgttggcgccgtcgaaccagatttcaaagacatcaccatagttggtcagtagttcatggagttgtttatagaaataatctacatattcgggagttccgtaattagcttggtgtctgtcccagggggataggtaaacggcgaatttgataccatattttttgcaggcgtccgataactcgcgcacaatgtctccttgtccattcttatagggagtgttacggatacaatactctgtcagttgggtaggccacaggcagaaaccgtcgtgatgtttggcagtgaggattactcctttcatgcccgattctacaaaggtctttacccattgctcacagtcgagcttcgcagggttgaatgttttaggatcggagtctccgtatccccattcacggtcgttaaaagtgttaagtccgaaatgtacaaaagcgtaggtttccattttctgccattccacttgtttggcttcgggaacgggtaagattgcttccggagcttttaccggattgcaggcactcaataaaagagaagtaattcctgcgcaaagaatcaaggggtgttttttcatgggggtaattattagtgatttattaataaatatgtcttgctataaactaagtccgaaaacgaaatagacttgttcttcgtagggattggctatcagttttccgaaaataggaagggagaagccggaagtgatctttaactctttggttgcggataatccgatgttgacaacattgaacttgttagagtagaaaccttcccacggtgtgaagccggcttcaatactcatatcgacatctttcacactaaagggatagcttagctcgcaataactggaccaggcgcgtttatcgttttcccggtaatcattgccggcaaacgttgtataccagctgacggaaagcgggaacttttcactaaatatatatccggctccgacttcgaaagtatgtccggtggagtgtgaactgtaattgaaatatttgaaaggttcttcttctgtctgggtaaaatagttgttagcataaagggttagattcttgtattcatattctagcgacaagtcaatctcattgtttttgttgcgaaactctgttgaaccccaggcataaactgtcagtcccttccaattaagacctagtgttggctggatacaggcattgcccgagtctattccccgccaaatgtaactactgacaaaatcggcatttacaaaaacttcttgtgcttgtgcaaaggctgtacaacataagattgcaataagtacgatttgctttttcattttatcgagttgttcttcctgatttacgggtgacaaatatacggaatatatggctgattagtaacaaatgaaacaaaaaaacggctgcattgagcagccgttcctttattaatgtgtaaataataagagttatttagaatgtgacgtccattttcagcacaaaagtacggggagcagctactgccattgggcggtaactgtattctttattaaacaagttgtttaccataaactggaaagcaacttctttcgttgcttttacaccgaaacggaagtcaacggttgcataatctgtgttatgcttcttccagtaggtagcgagtgtttctccttttgaataaccgaaaaggataccgcgtacataatccattaagtcgttttgtgttttagaacgctcgtccagcatcagataatccactgcaaggattttgcttttccatgccacattggcacccacattgatgcgtttccactggaagtctaccgttgttttgaaactatgtttcggacgatatttcagatacttacccgtatttgatttctctttcatctgaagcgggtcggtatacagtccttctacagcattgcgttcctggtaatccgcgtcacgcggttcggtatatacatatcccagattatagaataattttgtgttcttgttgaagttatatacaccgtttgttgaaatctccactccatagatctgtgctttcgatacattatggaattgtgctccgataccgaagcccttgccgtctgtcaacatctgaaatacatcgccaatactatttatcatcgtattgtttgcattattgaataggccgaactggaattctaccatatctttatattgagtatagaatccggcaatatcgacaaatccctggaagttaccgatcttgtatccttgcttgaaacctaattctgcattaaatcctttctcaggtttaatgttcggattcggataaacaccgactccgccaatgtctttacggagatatttctcattgatagacgggttgcggtaaccttgtccgaagctggcgcggataaaactgtaatcggctaattgataattcaatccggcacggaaaacggggcggaacggaatttttgttccgaatacctttgtttctgcttcgcggcggtggttgtttacgcggtagtattcggcacgtacgcctgcggatacactcaaacgatcccaaaaacgttggtcatattggaagaagagggctgcattatcacttttgtacacttcatccattacagcagagtcataacggatgtgttcgaaagtcattcccgtagtgatctgtgcgccaccgttccatttcttgttgaactgatagtcgagataatagtcaaagttcttgtctgtttgagttttcgggttgagtcgagacggattgataacattagacagccacggtacgagatcgcttggcaattgtccgttctgtattccgctaagatcaggcagcccgttatccataacccatgagataaggtcgcaataatcggcagttgttgcattgggaaagatgtttcccagtgaagtgaatgcaccgttcatggcatcatccagattgccgttgataattcccgaaccgataccgaccaatgcggggtatagtgagctgtaatcgccgtttacgatatttttaatcgtattcgcatcggttcccatgtttcccagaatatctgtgatagatgaaccttcggttgggcggacgatattgtctgcgctataataaaaacgtcctttgattttatgtgaagttccgttttccgggtttacataattgataaacggatcgatatggaagttgttttcttcgcgtcccatattggtgaaaggagaaggcttgtatacttcggtcggtgaacgccagataaagaagtccccgtattgattggaaaggaagtctacattaaaaccataattcagaattttcagtcccatatccggttggtgataggtcaaactgccacccatgcggaaacgtttgttatatccttgctgacggtatccttcatcggtgaaaagattgatccctccactaacgtcgaaattaccgatacgacgggagtgggagaggtcgaaaccttcgtaaatcggattccgtactccactcaggagactaccacgcagaataggttttactgcatatttatcatctttccagaaattcttatcgctccattggtattcatcattctctgcatcaccgtatatgcctacgtatgcgctgaatcgtgtcttgggcgttaaacccgggcgtgcggtacgaatattgataataccgttcaatgctgaggaaccgtatagcacagaagaagctcctttgataacttccacctgctccacattttccaaaggtacggtgttccagttgatttctcctgttttcgggttcagtgtactcattccgtctaccagaatctggctacgtgcacctacaccgtaagtccacccgctgccaccacgcatggaaggctgcttgtctacaatgtcaacccccggcagggtacggagggtagatgaaatatctgtcggtgcctggcgggcaatgtcaccggatttcaccacatccatagaaactgttacatcacttagcttctgttcgaagcgtccagcactcactaccacttcttccagcagtttagtgctctctttcatatagacgtctttggtgactacttcgcgtttattgataacgataggcatcagtacatcatcatagcctacataactgaatacgaggtcgactccaccttcgggaagtttgatttcatattctccgttaatattggatactactccctgattgccgtggagcttgtaggtaacagctgctccgaccaacggttcgttggtcttggcgtcgtatatatgtcctttcagtgtttgggcaaagcttgtcccaaaacaagtaaggcagattaataaagttagtatatatattttcttcattgtttcttacgttttatttattcggaataagttctaaaccaaactctattctctcaggagatagaaaagcttctgaaataccatttaagaatgctgaaattataaatcctagcccttgcatatcctccggaagcatactaactattagcggactaagatctggtagtaatttagctatgggagtaaatccttctttatctaagtaaatataagtatgtccttcttttgaagtaacctgcatcgggattccggtagttaaccaattgaaaatagcgttgaaggaagtgtcgttgacattgaccaagaatccaagtgtttcattgtttaaactttgattaagtgtggttagcaattctttcactttcatggcatccatttgagatacagcatcaatgatagcattgattatgttcacatccatatatgtatcgctgctgctggctattgaggaaatgatattagctaagtttaattttaatattaacttaccgtctttttgaaaccaagtagcaaacccttttggagaagggatatacttacggtcagcaatgttgggagtaatcatctcctgtgttaatggagtttctagaaatccaaaaataacgtctatatctactcctgacaacggatcatttgaataggaagccgttacatttccgtctgctcctaaagtgatgtcttgcagaacttgtggcaaaatgtaacttactatattttggattccattaccccatgtttgggttgtagctccgctttctgtagcttctacatctgcatggaaatagcatgacgcatttaatacttggccatcaacctcctgccatgtatattcatttccccaagtgtcaccaactaatattttttttacgccgttaacgacttcgggtaacttataagtatttgcccacaaatcggcattacccatttggatattggatatgtttaaggtgagttttccttttgttacacgtccttcgtatctaaaagtagtcaatgtttcatttcccataccattaccggaaaaagagtatccttctgtatctccggaaaggggaatggatgtaatctttattgccttttctcccggaagaatatcgtagagagtaatgatagcagtttctcctgtaacagtactgaaatcaacagatttcccgttcattgcatcaccgttgtatgtaagaactaaattgggattaggattcgaaatcttgtttgaataattggctgtcacgtctactggagccggtccatagtggtcttcgtcacaagatgttaagaatgcggatattacggtaaggaagcttatgaataagatagataattttttcatcgttttttattttaaaatgatttatttttggatagtaaggtctacgccgatttccattttgtcgaataatgctacaacctcatctaagtttgtttttaataaaatatcaatgatattgataaatggagttagtgtctctttttttaaatagatataagtatgatcttttgtagcctgactaatacccattggaataccatttctcatccatgaaagtaaagttacaaaagtgttatcatccatttttaaaatataggtgattatctcattgtttaaaatcatgttgagcgtacttaatgctagcttcaatcgggcagggtccgattttaaaagagcttcgctgatacctgcaataagttggggatcaatttgctgaccgttattctcggcgatgagtgaaataatggctggtatgttcaattgtactacaaatgccttatcacccgtctgattccagtaggccaaacctttcggggaagaaacataagtacgttggccgattaatccacggaattctgcatccgtcttacctgcattagccacctccatgatctctttcatgtctatgggacttgtggtgtagttggcagtaacaataccatctttttctaatgtaatattctttagtacatacggaaagagtacatctaatatattagttgccatttgctgcatttgcaaaacgataggagcaatggattcggctccttctttcgttgtaatattcacatagcttgctccactattacgaatggttgcttcttcatttgtagtatgtgaatatgcaggaaatgcataagtatgagccagattattggcatgagccattgtgacatccagtgagagtttcattgcttttggagtaatgattccattatacttcaccgttactccccccatcgtgatattcgttccgctaaaggtataggcatctttttctccgttttcattaagcttgatgcgactgataggagtagtaacttctcccgggataattccgtttagtgtcagtgttcccgtttcactatcttccgttttgaaactggcagtctttccgattagtttctcgccgctgtaagttaaatccagtgtatacggcttgatgtacgagccatattcctggctgatttctcccggccaaaataacttgtcgttataggtttcttcacatgatgtaaagaaaaatactgcgcaagctacacaaaatagttttcgtaagtttttcattcttttttgtttttattgcgtaattaataaaactttgcaaagttcggctaacatctattaatttacaaggtctgtttttatgaattaatgttctatttttaattatacggagaaaaatgatataaaagcatttgaattaatgttctatttttaatgtaatatgttcttcttttaagaaacatagtgaagaatggaataagatagaacaagacaaggtatatgtatataaaagaacggcgtcccacacatttcgcgtgtaagaaaccgttcttattttttcctacttctaactaagaaaagagcctttttagaatatcctcaaatccgcaactacgcgcctaatatgatacagaagcgaaaagaatctgcatcgttagtaaaaagggggcacagtgcatcgaatgtcaccataaagacatataaatgccccttaccccaccatgcgacttgaggcaatacgcaaaatcacgactataagttgtcggtgttatccaaagtcattctggaacacattggcataagcattgttgcatgaatagatattcagcacatacttccttgatgtcctgacccatttggctggcacagagatgaacttaaagacaaacgtcttgatgcggcttgttgctttgagtccgaacctcttcacgtcaagcctcgccatgatgaatttatagaagttgcgtatgagtgccataagcagaagaaacaccgtgttttctcccataaaggattttggaagcctgttccagccgaatccgttattcatatcatcgaagatgcgttccttccctccacggaggttatagaattcgacaatctctttctcggaagactcgtagtcatttgtaaggatgcagcggtaggtgtattctccttcccacaggtcgagttcgccgtctatccgcttctgtctttgaatcacaagacggtatgccttccctttccatttctcgatgagaatggaggccagctcaaactcaatgccgcccaattccactttcttccaacctctgagggcaaagatgtcattgtagagcgaactgcatcggttagcacggatatagaaggtcttgcagtgtttagcaatctcttccactatctcttcagaacacgagccgcaatcagctctgaaacggttgataataagcttgttttgttcaaacctttcaaagaacctcttcagcgtgtccttctggtggaaacggacatttgtgttgccgtcgctgttctcaatgccgacaatcaagttgccaataaccgccacgccagggcgataaccaaggaacttcttgtatgtaggcttcgcatcaaacttctcagcctctatgaactggtggtcgaagtcaacgtcatacccctcgccctctttcagctgccctgtggacaataggcaattgaggagcagtgtattcagcttgtctgccgtgttgaagtcgtaggtcttgccagtgtcggatgtgtaggaaatgttatcctgggtcagttcctttatggctctaagaatcgtgtcggcactgcatgtgcgaagtgtcggatgaagcgaaaggtggtacatcagatgagtggtgacatcctcgatgcatgagccgccacaaaaataaacgctcataagcgaacggatgatttcgctgtattgataaccatacagcctgcatctcataccgagggttgagtcgattacagatgagagtctggagtcaaattgctccattattgaaaatattcctccaaaaggagtgagtttctcggatttaattgctacctttgccatgtctgtcgggtttgatacatattttgatttgcaacactaagataggtgaaaaatctgacatggcaaattcctgagcaactttttgttgctcaggtacttaaaaagttatatttgtaatagtgttgcggaattaaggaatatcacatccattttaaggtttatttagattctctacatgtatttacaggcaactttgtaagttgtgaaattcgtcactgattgatgtactgtcgttgaaatatgtcctttggtcgattgtttttgtatgaaaggagtgtcggttttatctttgtttctgctaacatggaacaatgaggcatggaaagagtgcgcaagcaacaattattggaacaaagcatttacggagtaatctggagtgttattttctttcttccgttgatcggagaatattttgccgtaagtggtggacttgagaaagaagaagttcgcacgcttgtacgtgactcctggttgggaattcttcctttttttatgctttttctgttgaataactatgtgctggttccttatttcctttttaaaaaaaaatattggcaatatacactttctttagtttttgcaataggtgttatttttttgattgttccgtttccgatgaaagggcgtttcccgaaagaattcagacaggagcctgtgtatcattcagcaaaggaaagccgacggaatcagattattgaaatgagagaaaaggcgcggaagaaagagacggctaattgggaactaccggaccaggtgaaatatcccgtggaaaagtttcaacgtccggaggctctccttaaacctgttccgtttccttatcctcctatcacagttcgctatcttattcattttatgattgcctttcttatggtaggatttaatatagccattaaacttttcttcaagtcttttcgcgatgaagaaatgttgaaggaactggaacaccagcgcttgcagtccgaattgcaatatctgaagtatcagataaacccgcatttttttatgaatacgctgaataatatccacgcattggtagatattgatacggggaaggcgaaaagtacgattgtagagctttccaaactgatgcgttatgtgctgtatgaggctagtaacaaaacaattcttcttaaacgggaggttcagtttctggagaattatattgccataatgggattgcgctatactgataaagtctccattgaaatgaagtttcccatcgaagttcctgaagtacagatacctcctttgctttttatttcttttgtggagaacgctttcaagcatggagtcagttaccggaatgattctttcgtccgtgtcattgtgcagcaagaggagggaaaccgattgacttttcgctgtacgaatagcaataacggaagggctgacgaacaacaccacggcatcgggctggataatatccgtaagcggctaagacttctgttcggtaatgattatacgctttctatcacacaggataagaataaatttgatgtattacttattatacctttattataatgaaatgtttagcaattgacgacgaaccgttggcattggcacagttatcggattatatatcccgcgtccctttcctgtcgttagtgaaaccttgtcaggatgcgtttgaggcaatgaaggtattgtccgacgaagatgtcgacctgatatttgtagatatcaatatgcccgatttgaacgggctggattttatccgttctttgataagtcctccgctggtgattttcactaccgcttattccgaatatgcggtggacggcttcaagttggatgcggtggattatctgttgaaaccatttgagtttcaggacttactgaaggcggcggataaggcccgcaaacagtttgaatataaattgttggagcaacagagtgaactgggaaatgcttcgcaggtaaaaggcgattcgttgtttgtgaaaagcgattgcagggtagtccgcatcgatattaataatatccgctatatagaaggtatgagcgaatacgtccgtatttttgtggagggggagaacaagcctgtcatcacacttgccagtcttcagaaaatggaagaacggcttcccgcacatttcatgcgtgtgcatcgttcttatattgtcaacttgcgtaagattaccgaaatctcccgtctccgtattatcttcgataagaatacgtacatccctgtgggtgataattacaaagaacggtttacggaatttatcagtaagctaagcttctcttaaacattggtcatgctttatccgatgcggtatgttgtccggaaaataactacttaaaaataaaagcctcagaagctatttatagctaatgagacttttattttaagaagtggagatactccttttatttgattcccagttttttagcaatttctttaggcagtgcgtctttgtgtacaaggatattcatcgttttgtaagcgacgaatgctttggaagcataccatataccgttgtatttacctgatttaccccaagaattttttaccatgaaatattcttttccgttctggtctttagcgataccgtaaatcaccattccgtggtcgtcggtagtttcccagttgtcgaatgccacctggcgcatttcctgagtgacgttaatttctggatgtggtttggttgtcattatttgacgtttgttggcagtggtcaggccagtccaacgggccatatccgaaccggaaagttcagattctttgtttatatccggcattacggcaataccatcacgtgtaaacccttgttcactgacgtcactaccccatgcaaaagtatatcccttcttcactgcattatccattacagccataaactcgtcgataggcaagttgtaggagaggccattgcgccagttgtcctgaatctcgatagcaaattgagaatagaacgggtgatgtgtataggaagtcaatgaaacatagtcgtccggattcagtcccagtgattcggcaaaagttttcggtgtatattcctttcctttataagtgaagttttcaggacattttcctaagtatgtgtcataaatggctgccagaccgttcttccataccggagtcagtttacttagtttacctttagcgatagcattaatgtagccggaagcaacagcgtccaattcgttgtgtaccggcagagtatcgccgtacatgattcccggcattacttcctgtggaacgataccgtaatttttgatgcagtacatcacatcatagaaacttcctcccggcgagaaagaactgtcaccgtgataacgtacataattggctccacggtcttgcatcgttttgtgtaccacaaacatttcagccagatcatattcgcctttgcctaaacgtagcaattctgattcaacgaatccgagagttgagaaactccagcaagtgctcgaacggttttggttcttgattgaagtaatcggattttctttcactgtcgtgaaaacgaagccctcttcgggttttgcgtcttgtgccattgtgctcaggctgaataggcctagagcagcgataaggatactctttttcattcttatgacattaatattaaatttgttttggttacaaagatagagaatccttggggtaattccatattcctgtatacaatttgcataaaaaaagaataaaaaatagtgtatattctattttttcatgaacaaaaagcggaaagagaattattttcaattcactttccgctttttatttattttattttaattccgagattctctaaatcatgacgggtaacagtatagttttctccggttttcatgcgtctcatgactaatttccctacctttttggcatcctctttttccatgaaaggctttttccccgaaatggcgggaataaaaggctggaatatggttatatggttgttgtaggatatttgataaccgtatcctccgtttacttcgattatttcgatcgaataatgcgtgtcggaggtggctgctacggaaaacgccaggcaaatggcagctgttaatattcctgcaacaaagagccggctgctgtttttcttagtcatcttcttcccattcatacggatgtaattcccaagtatcgtcataatagtatccactgcttcctccggtagttataataccccgtttgccggtagagaaacaaatcgcttttgtgcgtgcacttccttcgaaaggggtatagtcaaaatcatcttccgtgtcactactacgccataaatctgtgttggggtcatatatccagtagttatttcgtaggcttgaaccggatgtctgccctaaagtgatataagcctggccgtctataacaaaagcgcagccgtatgtccgggtgattgaattataatcatcatcataatcatcactgctgtcatccttgatttcgcggagacgggtccatttattttcttcactcttgctgggatcgaatttccagaagtcggtaacatcctgaccgttgttggttcctcctacgatgtaagctacattgtcgatgataaaggataagccgccggttcttttctgaccgccgaatccgtttacaatgctccactggctacctgaaggggctgtcgggtcgaaacgataaaaatcctttgtctgtttatcgtctttggattgtccggttcccacataaccgtagttaccgatagtgaaggctattgcattgattcgcgcatctccgggataatcatccatttgtctccattcatttgttgccgggtcatattcccatgtgtcttttagatatgcgtatcctccggtatgcatcggatcatcatctttatatacggtgtatccggtggtcacatatcctttcgagcctactgcgaatccggcagcgccattccgggctgttgcatcgtcgggcatatctttgcattgtgtccaccagtcattatcaatattgtattcccaacagtctttttcccgttggtcttttccccgatatcctccgcataagtaccctcggttacctatcacaaatccggctgcatcctctcttgcccttccatcgaagtcggaacggcgataccacactcctaatgtgtcatcatcatcatccgaacatgagaaaattgatagcatagctaccgacactaataatagttgtagttttttcattatttccattcgttttattacattttaaacttggcgcaaatgtagctatcaatgtgttttgagaaaaaagttatcgacaaacagctttatttcctctatctaaaaaatgcgagtctataaatagcgggtaatagtcgataaattttggggatattttcctaaaggggttcctttgcaactcaaaaataagattcgttatgagactatttattacacttttttattctttactgttgttttgtatcctattctcttgcagggatgaatcctcttccattggggctaaatgggtggatagttcttttatgaatgctgtaacagatacgtgtacagtaacgttaagtactttgctaagtgactctttggcaacttcgggagatacggtttgccagatcgggcgatataaagacaatctatatggagaaattaagacttcgttttatgcggaatatgaagtaccttctcattctcttaatgaaacaactgaatatcagtttgactctattaccttcaaatggtattcttcagggaattatctgggcgatacactggtttatcatcgtattgagttatttagtctgtcacaaggaatctcattggaagatgatggttacctttttaataagaccaatgttaattataaccggaataatcttcttgctactctttctatacgtcctactcccggacaccgtaacgagatgcatgaattacgtctgcctgacgaatggggaaaaaaatggtttaatctgatgttggaagatgaagaatgtatggaatcgcaggagcgtttccgcgctttttttaaaggaatagcttttatacccgatgaaaatgggacgtgcattaacggctttcaggtgaatgattccagtttttgtctgactctttattatcatgaactcaaagaaaagcctacggaacagactttagtgtttaaggccagcagttcattgaattatacaaaggtggaacacgaccgtaccggtactcccatagaatctctcagagccggtactgattataatcttttttcttctgaaagtgatcatcaggtgtatctgcaaggattgaccggtatgtatatcaatctcgaatttccgcatctgaataatctgaaccagaaagggagacttgtctccattgaaagtgcggtacttaaactctatcctataaaaggtacttataacggaaaatatccgttgccgaaatcattgactctctatacggcagaccagaataattcaacccaaagtgtcataacggacctttccggaaattccgtacaaacaggaaatctggtagaagacaatgtctattatgaggatactcattattcatttgatattacctcgttcattcagaataatctggggacggcaggacagagccgcgaaaaattacagttgtttctctccgacaatgatttttataacacagttcagggagtcattttcggagatagtaaacaccccgtgaatgaccataataataatgtatctctcactatttattacaagacatatacgaaatgaaaagaaaagttttatctattttcatattaagtgcaaacttattgaatcttactgctcaaaacatgacgaactctccggcttctatgttcggactgggtgaattgtctaccggagaaggaggaatctattccggtatggggggagttggtatcgcattgcggggagaaaatgcttataatagtgcgaacccggcttctttgacgggattgatgccgcagtattttttcttcgatttgggagttagcggagcgtatgaaaagtattcacagtccggtgcaaacaatcattcttttaatggtaatcttaataatttgggtgccgggtttcgtattgctccccggtggtatggggctatttttatggctcctgtcagtagtgtggggtatgccatatcgctcgagcaggatgtagcgggtacaaatggcgagactgtgacttcactttttcaaggggaaggcggattatccaaagttggaatcagcgttgctcatcagttgtggaaagggctttcgctgggagctaacttttcttatgtgggtggtactattacgcaatcggagagtcagggaagtgctacggaaacaaacagttcgtataaacatacagtgtatgttgattttggattacagtatacttatgagatagagcgtgaccgttcgttggtagcgggtgctgtatatggatattcccaggatttgcttcaagacaacgatcattcggtaagtagtagcagtagtagtgggagtattacagaaaaaggtaagaagtatcgtacctgcttaccgcagtttttcggagtaggggtatcttataatacgttgcgttggatggcttccgccgattataagtttgttgactggagtcggttggagtcttctcgttctagtgttagttttcataaccagcaccgtttgatgttgggagggagttatacattagggaatccctatcggaaacctgtacgtctgttactcggggccggaatagggaattcgtatctttctattcagaataagacgacaactaattattatctcagtaccggaattaattttgaataccgtagccgcagtacgctttcgttaggggtaaaatatacagatcaatttaaggtaagttcagggaggtttcaaggacagaaactggctttcttcctgaatatcactttctcggaaaagacttacagagctaaattaaaataaaatagataatagtataagggtatcctttggggataccctcttcttcattatttattgtctttaggtgttactacgtaatcttctttaataaattcgtcgtatacacgcttcggatgatcaaatgctgctgttccgtttctctgttcattgaagttttcccgttggaattgtttcagtttcagattgtcttcagcatattctcttaattttttatgttcacgtccatagagtgaactttcggttacgtcagaatcaagcaagctttccttaggggtaatggttggtaagagtacttgttccagtaggccacgataagccccgttatattcacaccatacaatatcgttagcgacaaatatacggtaggagtactttgaccatgcggttttaatctcaatggatttggcatagatttcaatggttgcttctgagccatacgcttggtcacggatcacaacggtcgtccgaccgctaagttcttctttcacggaagtttgccattttccggaattcatgatttcttcaataatttccggcaacttttctttaatctcaaactgtattctcatggtgcttgcctgcgggcaggacttttttataatttcctccttaaaacaattaaactagcctaaagttacgtagattgaagcaaaaaagcaaggttttgtttaaatatttgctatttttgccaaatgttctgccttttttgtttgtttttataatatatatgcaacaaacagtaataaaacggggtatgtaaagagagtgataaatataaaattgggaagattaagatgaagaacttgaaaattgatgaatctacagggttggtgttggagggcgggggaatgcgcggagtatttacttgcggtgtgcttgattattttatggatcatgatatccggtttccttatgcgataggagtttctgccggtgcgtgcaacgggctgtcctatgcatcgcgccaacgaggacgtgctaaatacagtaatattgacttgttggagaaatacaattatatcggtctgaaacatctgcttaaaaaacggaatattctcgatttcgatctgttgttcaatgagtttccggaacatattcttccttatgattacgaaacttattttgcttcttcggaacgtttcgttatggtaactaccaattgtatcacaggggaagctaactattttgaagaaaagaaagataaacgccgggtgatagacattgtccgtgcgtctagtagtctgccttttgtatgtcctgttacttatgtagataatattcccatgcttgatgggggaattgtagattctattcctttgcaaagagcgattgctgatggttatacgagaaatgtcgtagtacttacccgcaaccggggataccggaaagattcaaaagatattcgtgtcccttcgtttgtataccggaaatatcctaaactccgtgaagcactcagccgccgttgtgctgtctacaatgaacagttggaaatggttgagaaaatggaggatgaaggaaagattttcgttatccgtccgcagaatcctgtgatggtagatcgtattgaacgggatgtgcagaaactgacagaattttatgaggaagggtacgaatgtgcaagaaatttggtcgaaaaataaacagattcttacatctctatagctctattttttagatgaaagaagtaagttacttatactgttcggcagccgctactttgaagctcactatttctgctttgcttccggaatttttagttactcttaccagatcatcgaagaaagtattctattagctggcataagcagaagaataaagctttgtctcaaaagtaggaaaataaattcaggtatgcaaagagagggatagcttcattgcgatgtgacaggcaaaaaagaaaatgttcaggacttgcatcaaaagtgataccctttgaaacaaagttgatagacggaggtgaagatatgacctatttttgcctccgtcaattttgattagatacttgtataaaacagaatactttgttaccatgaaaacaacctcttggatgaaattatgtaaaggtgcggtacttgcattggcggtctcttacggactgatttattgccatacgaataaaagcaaatttatgttggaacagaaaggagacagcctgactctcattcacatcaccaatcctactaattatatattgcttccgatcgaagaggcagcggaagaaagccgggttcgtctggacataggagatgcagcggatactgatatggatattcggcttgcacagactaaagtagactattgggttccgtttgtcctacctgctgatgctaaaactgtaacagtacgtgtgcaaaagagccttggagatgctctttgctggaaagaaatgaaattatccgatacattcgatccgtcccatacagataagtttcgccctgtatatcaccatgctcccctttatggttggatgaataatgcgaacgggctggtttatgaagatgaagaatatcatttatattatcagtataatccttatggttctaaatgggggaatatgcattgggggcattcgataagcaaagatttgatgcattgggaacatttggcacctgctatagttcgtgatacgttgggacatatattttccggcagttctattgttgatcaggaaaatgtggcaggttacggtacaggtaccatattagctttttatacttctgccagcgataaaaacgggcagattcaatgtctcgcttatagcaatgataacggtcgcacatttaccaaatatgataagaatccgattttgcgttcttccgatagaaggaaagattttcgtgatccgaaggtattctggtatgctccgggaaataaatggataatgattgttgctgccgataaagagatgcgtttctatgattcagaagatctgaaagactggaattatatgagtagctttggtgaaggttatggcgtacagccttgtcagtttgagtgtccggatatggtagagttaccggtagacggtgatacggaacataagaaatgggcattgattgtcaatgtaaatcccggctgttatttcggaggcagtgcgacccaatatttcataggtgattttgacggaacaagatttatttgtgatagcaaaccggatgttacgaaatggttggactggggaaaagaccattatgcgacagtttccttttcgaatatgggaagacgtgtgattgtagtgccttggatgagtaactggcaatattgtaataatgtcccgaccaaaccgtttcgtggcgtcaacgccttgccgcgtgaactgggactttatacgcaaagcggtgacatttatctttctgcagctccggtagcggaagtgaaaaatctaaggaaagagacaaaagaaattcctgcttttaccgttgcaaatgattatcatattgaatctttattaccggataatgaaggtgcttacgaactttcattggacattacggcagaaaaagctgaaattattggattcagcctgttcaatgataaaggtgagaaggtggatatttactttaatcttcctgaaaggaaactggtaatggatcgtacaaagagcggtatcgtagattttggcaaaaacagtgtgacacatgagatagaggtgcacgaccgtcggaaaacgacttctatcaattacattgatgattttgcattagctacatgggcacctgtccgaaaagagaataagtaccgactggatattttcgtagataaatgttcggtagagatctttttgaacgaaggaaagatagcgatgagcaatcttgttttcccgacagagccatacaatcgtatgtgtttttacagcaagggcgggacattcaaagtcgatacttttaaagtacatagattaagcctatgacaaggagaaacacctctgaaatcccataaaataaggaggtatgcaacaaatattacagcctttgaaacattttttttagtcgattgacataaatcaaccgtaatttgcaacagcgataaagagaatattcgtacttttaaattaataacattaaactaatgctcagtattatgaagaacaaaaaaattctttgtagtgtttgtttcctgtttgctttcgtgtcagtcctttgggggcaaaacataacggtaaagggaaatgtgacttccaagacggacgggcaaccgattatcggtgcttccgtggtgcaaaacgattcgaaatcaacagggactattacagacttggacggtaactttactattagtgtaccgaagaatgcatcattagctatctcttatataggatataaagaagtgattattgcagcaaaaccttcgttgaagatagtaatggaagaagattccaagatgattgatgaagtggttgtgacaggttatatggctgagaagaaagccagcctgacaggttcggtagccgtggtgaagatgaaagaagtggctgatattcccacaggtaatgtgatgtcgggcttgcagggtcgggtagccggtatgaatgtaacaaccgatggtaaacccggtggggggaacacggatactaagttgcgcggtattactaccattaataattcttcccctctttatgtgatagatggcattcagacacatgacaatgtcgcttcaattatttcttccaatgatgttgaatccattcaggtgctgaaagatgcggcctctgcagcgatctatggtgcgcaggccgccaacggtgtcattatcattaccacaaagcgtgctaaggaaggtgatgtgaaagtgagttttgatatgtcactcactgcccagacttttgccggtggtgttgatatgctcgatgcttaccaatggggagatgtttattggcaagcctataaaaacacttacggaactcatccgaacagtgtagtgtatggaaatggggaaaaagcccagttgcaggaatattatttcgaccagaacggagtcaaaataaaatcgggtaacaccgattgggcaaaggagatattcggtacggctttgatgcagaattacaacctttctctctctaagggattcaaagacggtaatgtagctcttactataaactatatgaatcaggatggtctttgtcgcaacactgactatgaacgttttaattctcgcctggcttctaatttccgctttgttgatggcaaagtacgtgtgggtgaaagcatttccgtgaaccactggttggaacatctcaatccgtccggtatagaagaacttgtgattgcccagcatcctgctattcctgtgtatgatgaaaacggaggatatgccggtggttacgtagacatattgggggataagccgaatgccgttcgcttgacagataacgaagctgataaccgtcataaaagctggcgtatctttggcagtgcttatttggaagtagagccaattaaaaaactggtattgaagagtcagtttggattgaactatactaccggtttcaactcaaccttcgtcccgaagtggagcgaagccgatcgtaaggtcgatataaatgagctgactgtgcggcaggataatagtgtgcagtgggtatggtcgaataccgccaattatagcatagaattaggaaagaacaatatcagtgctgtgataggaaccgaggccaagaaagaaaacggtgaacatttgcaggggtatggtcgcggattggtgatagaagacctcgactatcgctatctggacacagtgaccgaaggaaaaagtgtgagtaacaatgcttccacttatgctatggtttcttacttcggtaaggtgaactatgcgttcgatgataagtacctgatatcaggaacggtacgccgtgatgcttcctcacgtttcggtaaaggtaacaattcagcaatctttccttcggtatcagccggctggagagtttcacgcgagaaatttatggaacgtacacaaagttggctgtcagaccttaaactgcgtgcatcatggggtattaatggtaacgaccagattgacaataatgctacatacaatctctattacaccaatatgtccaatggttcctacaatttcaacggcgacggggcgacggtggtacccggcgtacagaaagaccgttcgggcaacaacgatttgaagtgggaggaaactaaacaattgaatttcggtattgatgcagccttcttcgacgctcgtttgggggtgactctggactattttcagaagaaaaccactgatatgttaattcagaaaccatatatcggtgtgatcggtgaaggtggttataaatggtataatgcagccagtatggataataacggtgtagaagcgactttgacctggagggacgaaataaaggacttcaaatatgacatctcattcaacctctcttattacaaaaataagataaccgaacttccggatgtcatcaaatacacttggggaggtggtaatggtgtggataaaaccattgtaggacagcctttcggttcatggatgtcatataaagccgatggcatattcaagaccaagcaagaggtatatgaatacctgagcaagtatgatgtacagattggtgctcccggtgtgggacgtattcgctataaggatcttaatggcgacaacatcatcaatactgccgatatggactggcaaggcagtgaccagcctaagtttatcggtggtctgaacataggtgcatcctacaaagggtttgatctttccgtattcttcaacggtatgattcgcgatgcatggaataactcaaagttctatacggatcttttccaaggctggacgggcaatcactctacgcgtctgattgatgcaatgaatgcttggaatgtgtatgagcaaaccggagtctataattgtaatatccctgcactgacggtggttgataataatgtggaaacacgcagttctactttctttattgaagatggttcttatgtgaagttgaagactttgacactgggctacaccttccccgataagtggattaagaaagcacgtctttctaatttgcgtgtatatctgcaagcgcagaatgtcttcacgctgactaattatactggtgccgaccctgaaggattgggctatccatatcctcagcctcgtacctacacattcggtctatcacttggtttttaatcttttatcctaaatacagaacattatgaaattgaaatatatccttgcggcaggtgttgtggcactattggccggttgtgatgagagtcgttttcttgatactaaacctcagggtacactcaatgacgatttgttgtcgtcggctgaaggtgtggaactcctggtcacttcggcttacgccgggctgaaaggtcccaatcgtgatatgcactgggtaccgatgaccaattggacgtatggtgaagtacgttcggacaatgcctataaaggtggcggtggtgtaaacgatggtgacttttgtacactgcttgaaacttttaagatagatgctacatgggctaatgccgatgaaaaatggtttcaactttattgttgcttgcaacgttgcaacagtgcattgagagtcatgaatacacttgatgagaacaccttgccggtacttaagagccgtaaagctgaaatgaaagtgattcgtgcacatttcttcttcgaactggtccgccttttcaaacaagtaccttactttgacgaaaacgtggatattgatgattataaatacatccccaacaatcagtttacccgcgaagaacttcttggcaagattgcgcaggagtttcttgacgccgctaacgacttgcctgacactcaatcccaaataggccgtatcaccaagaacatagcatacgcatacgctgccaaagccaaactttatcaggcttaccaacaagatgagaataatcaggtcattgctgtcgacaaacagttgcttgctgaagtagcggctctttgtgataaagtaggtgcgcaagggaaggcgtatgatcttttgaatgactttcagaagctcgaccaactggaatatgaaaatggggtagagtctgtgtttgccgtacaatattcgatggatgatgaaaccgaaggtgccggaaacataaattggagcaacctgctcaatgcccccaaaggtccttacggtggcgacggattcttcctgcccagtcagaatctgataaacgcgtataagacagatgcctatggactgcctttgtttgataccttcaacaacagtgattatggaacgtacgaagggaatgagctcactaacgttgaggtaacagtagatccccgtctggattttgttaccggtcgtccgggcattacctggaaaacttacacagttgagccttgcaaagcaaattggatacgtaacagtggcgaatatggctttaactgcaccaagcgcttttacatctcgcctgaaagtgaagatatgttccaggggtggccttggggagcctctcatcttaactggcagataatccgctatgctgatgtattattgtggaaggctgaagccttgatagagattggcgaagctgccggactggaagaagcccgcaagattattaaccgtattcgtctgcgtgccaagaatagtccttatgtgaaagactttaagcatcccgaacaaaatgcggccaattacctgataggcgaatatccggctgaaggttggaatcaggactttgcccgcaaagcattacgttgggaacgtcgcatggagtttgccatggaaggtgaccgtttcttcgatctggtacgttgggggattgctgaggaaaccatgaacagttacatcgttgtggagcaaaacaagcgtgtttattatcgcggtgcccgcttcatcggtggcagggatgaatacttacccattcccaatgcacaatataatttctctgaaggtacttatgtacaaaacccaggatatggtaagtttaactaatataaactccttaaatatagatatgatgaaaataaaaagatacttgatgagcgccttctgcctgtgtatgttcacggcctgcgatagtgatgacaataacctgttgtgctatggtacccatactgacatcgaaggtgatgttactgcattcggagctgttggcgatggaaagaccgactgttcgaaagctataaatagtgcaatagcctcgttgcccgccgaagggggagtattggtgattcccgaaggtgattttgtacttgacgctcccattgtaatcaataagcataatgtgacgatcaagggattgaatcccggtatgcgcagcaatattgacgtgaatggaataaatgacctcttgggtcctggcggtggaagtaaattggtggcgcgtaatgccgaggctgccataaaagtggagacgggcatgaaaggcgtaaagattatgaacctgatggtgtcaggcggcacggaagccaagaacatcggcatacactttgccggcgcgaccgataatggaatgctttctaatattatcggtataaatttgcataccggtgttaagatagaacaggcaaaaaatatgcagatagtcaattgctgggtatgcgaactccctaatagtatcgagttgattggcggtgaaaatattgttgtgaagaactgccaattgggtgctcaacctacggggattacttgcaaggtgcaggaagtgaacaaactttcgttcatcaataatcaggtttatcccgacggacgtgaaaatctggtacttgacgcttgtaataattgtgtgattgagggcaacaatttcaagagctactataatggtattctggtgttgaacggtaatgataatacggtgaataagaacatcttctggcttacgggagctgttcagaaccagctgctcgaccacggcgacgactttggcatcatcaacgtaaagggcaacaataatatggttgcatccaatagcttgtcgtgcgaatgggcttatgccggcgctgtgactgtaaatgccgttcagggaaccggtaacgtgttcaagaattgctttgttgacaacttggagagctatcgggtatttctggtgaacgcacaaaccgaagtctccaattgtgtatcatccgataaggtgagcatagtagaataacctccctatcatataccattattaatataataacaccatgaagataaataaattcttaataagcggactgctctttatattgggcacatcttgcagtaatgacgataactatacgctttgtgatgaatgtaacggtcagaagataatagatataacccagttcgggcttccgaccgacggctctaccgattgtgccgacctcatcaatgccataatagccgaccttccgcccgagggaggtacgatacttattcccgaaggaacgtttcgtttggatagtcccattcagctcacccgcaatttcgtgacgctgaaaggcgtgaatgacgacgtcgctgctactgctgccgatgcccgggaaagtcgcctgatactgggaaatgccgaatatgcattacacgttgcccctgttgccgatatagacggacgtaagaaccgtatcagcggtgtggaggtaaacggacttacacttgtgggaaaggccgatcatcagggaaccggaatctttgtcgagcacgataacgatcgcctgcacttcttcaacatcagaatggagaatatgtaccagggtattaaactccagggatgtgatgccattacattggctcggatagatgcaaccgacgcagtgaatggtattgaaatgaacggcggcatacagaatatggtgaccaactccctcttcggatcagcgcagggcggtgtggcggcgcgtatctccggtgaaagtaacctgatattctctcacaacaaactgacggcggaagatgaccgttgtgccagctttacaggttgcagccgggtgaatatctcggataatgaatttacaggaaacaaaatgaccttctttgatataagcgggcaaaacaatctgataagtgacaacgtgttcaccgtaaacaggagcgataatcaactcaatggcaaagaggcggactatggagtgattcatgtgaaaggagaatataaccacttcacgtcgaacaccattcatgcggattggagtgacggtatagaaaaccccgtgactgtgaatgctgcggaaggggaaaataaccgtttcgcaagtttcacgatagaaaatacgaacagcaatcaagtcttttatgtcagcgaatcgtctgaagtgatagattgcggagtgacagaagaaaatataaaggtgaaaccgtctgaagcgcaggacttgacgaacgcagcttatgtgataacgtatgacactcccgaagagatagaagatgatgatgaaaaggcctcctatacatggttcaagaaacagtttgtaaatggcaaagtcattactgccgctgcattggctggcgaggatctttctgcttatgatgttatttgggtacatatagaccgtgtgggtattggagccggctgggacaagttacctttgtctgccgatgcggttgccgcgttgacaacctattataagaatggtggaaacctgttcctgagcaatcatgcgactcagttggttgtaccttttggacgtaccgaacgggctcccggaatatttggagacggtgaaggcggatcaggtgcagacatttggacgattaatgccaatatcggaatggagtatgaccatcgctcgcatcctgcttttgccggtatggttacttccgaccaattctctcacgaaacattcccgttgatcggtcccggacagcgtgaagaccataactgtatgtgggatttgaattcttatggtttccccggcctttaccccaatgcaggaaatgtggtgaaagcgtttgaagaggaaaataacgctaccgttttggcaacatggggtcatgtgacggactattgttgtgccggaatggtggaatttgccccgacaacggaatatcaaggaacttgcatcgctctcggactggctgcttacgaatggaaccagaatagtaatctgaacgtttatcaggataatatcatgctcatgacgaagaacatattgcattatctaagcgctaagaaataggcaggtaacattttttctatcttttgaaacaaaagtgataggtgtagctatccgttacgcctatctttgcattgtgacaaatgaaaggctatgaatactaataattaatctaataccatattgatatgaatgtattattctcgtttaaacagttacggaccttattggcaatgctggctatgatgattttctcatttccggacgctgttgccgacgcaccttccttgataatcaaggacctgggcgaagggcattgtctggtacagataaacacgaaccaacgatatttgcttctccccgttgaggaggtgatgcctgatgtgcgtgtcagcatgatcgttaataataaagaggtgaaggctgcggacgttcgtctggcggtgaacagagtggactatttcgttccgctggacctttcgggctataccggcaaaaacgtactattgaagtttaagttgggctcgaacgaccctgtacggggcaaactttctgctgtttgctgcaaggagatgaagttggccgacaccttcgataccggcaaccgcgaaaagttccgtcccacctatcacttctcacctctttacggttggatgaacgaccccaatggaatggtatacaaggatggcgaataccaccttttctaccaatacaacccttacggctccaaatggggaaatatgagctggggacatgctatcagcaaagacctcgtaaactggcaacatctccccgtagccattgcgcccgatgcattgggaactatcttcagcggttcggctgttgtcgataccgataacactgccggtttcggtgcgggagctatcatcgccatttatacgcaaaacagcgaccggcaagtacaaagcattgcttacagtaccgacaacggacgcactttcacctgctatgagaacaatcccgtactgacatccgatgcacgtgacttccgcgacccgaaagtcttttggcataaagaaacccggcgctggattatgatattggcagtaggacaggagatgcagattttttcttctcccaatctgaaagactggacgtacgaaagcagtttcggagaaggccagggcgcacatggtggcgtatgggaatgtcccgatttgtttgaacttccggtagaagggacgaatgaaaagaagtgggtgttgctttgtaatttgaatcccggcggtccgttcggaggaagtgccactcaatattttgtaggaaccttcaacggaaaagaatttgtaaacgaatctccctccaaaaccaaatggatggactggggaaaagaccattatgcaaccgtgacttggagcgatgctcccgacaaccgccgtatcgctattgcatggatgagcaactggcaatatgccaacgatgttccgacttcccaataccgcagtccgaactccgttccccgcgatttgggtctctttaccgtcggcggtgagacttatcttcaatctgccccatctcccgaattgcagaaactgcgtgacatctcaaagaaacgttcgttcaaagtgaacggaacacgtacggtaaaagaaataattccggtcaacgaaggcgcttacgaaatagaactgtctatcaagaacctgcatgcggacgttatcggcttccgtctttacaatgacaagggcgaagaagtggatatgcaatatgatatgaaagagaatagattctctatggaccgtcgtaaaagtggtgatgtcggcttcaacgagaatttcccggcactgacgtggacagctgttgaaagcggtaagaatgagctgaagcttcatttgtttgtagataaatcaagcgtggaagcatttggtgacggcgggcgtttcgcaatgaccaatcaggtcttcccttcggaaccttacaatcacatcgatttttacagcaaaggcggagcctacaaggtagactcgtttatcgtctaccggttgaagcaataagcttctgccatttaatctatgcgctcttttcctgattccctacggcagagtatgtctacccctacggattagtacactgaaggcaacggtatacttctgtcaggcttacggtattaatacctcaccacggccgtggtaacttctctccacagccatgaagagatctctccacagccatggaaagaattcgtcacggccgtggcgaatcaacattaccgtagctttcatcctattatatcagtatgaaacatcaactgtataagcggtaaacgggtttattcccgtaggggcggaccggttaagccataaggacacagaatttataaaataatagatataacaatggaaaacagtaaaaactcttctctctccaaactgatcccggtgatgctatgtttctttgccatgggattcgttgacttggtaggcattgcttccaattatgtaaaggcagacctcggcctgtcggactcacaagcaaacattttcccttcactcgtctttttttggttcctgattttctccgtaccgacagggatgttgatgagccgtatcggtcagaagaaaaccgtattgctcagtctgctcgtgacattcgcttcattattgttgccggtttttggtgacagttatatgttgatgttgatttccttctctctgttgggaatcggaaatgcgttgatgcagacttctctgaacccgttgctctccaatatcgtgcgtggtgaccgcttggcgagcagcctgactttcggacaattcgtaaaggcgattgcttctttcctggcaccatacattgccatgtggggagcaacgcaagctattccgtctttcgatttgggctggcggattcttttcccggtttatatgatagtggccgttgtcgccattcttctgctcaacgccacgcagattgaagaagaaaaggaagaaggcaaaccgtctactttcggacaatgccttgccttgctcggcaagccgtttatcctgctttgctttgtcggtatcatgtgtcatgtcggtatcgacgtgggcacaaacactaccgccccgaagattttaatggagcgcatcggaatgggattggatgatgcagcttttgcaacgagtctttatttcattttccgtacggcagggtgtttcctcggatctttcatattgcgcaagatgtccgcgaagtctttcttcgctgtcagtgttattatgatgttggcagccatgattggcttgtttatcttccacgaaaaggcaatcatttatgtttgtatcgctttgataggttttggcaactcgaatgtgttctccgttatcttctcgcaggcattgctttatttgccgggtaagaaaaacgaagtttccggtctgatgattatgggacttttcggcggaacggtgttcccgctggctatgggagtggcttcggacacttcaatggggcagaacggcgcaattgccgtcatgactgtcggtgtactttatttgctgttttatacgttccgtatcagaaaataattttatatttgagaatcaattaaactctgtttatcatgaataatataatagtaggaatgggtgaagcgctttgggacgtgttgcccgaaggaaagaaaataggcggtgctccggcaaacttcgcttatcatgtttcacaattcggctttgacagccgtgtggtcagtgcagtgggcaatgacgaactgggtgacgagatcatgtcggtattcaaggaaaagaaactgaatactcagattgaacgggtagattatcctacgggtacagtacaagtgacactggacgctgaaggggtgccttgctatgaaattaaggaaggtgtcgcctgggataacattcctttcacggacgaactgaaacgtttggcgctgaacacacgtgccgtttgtttcggatcactggcacagcgcaacgaagcaagccgtgccactatcaatcgtttcttggatacaatgcccgagatagatggacaattaaagatatttgacatcaatctccgtcaggacttctacaccaaagaagtgttgcgtgactctttccaacgttgtaatgtcttgaagataaacgatgaagagctggtgactatcagtcgtatgttcggttatccgggcattgacttgcaggataagtgctggattctgttagctaaatacaacctgaaaatgctgattctgacttgcggcatcaatggcagctatgtatttactccgggggttgtttccttccaggagactccgaaagtccccgtggccgatacggtaggtgcaggcgattcctttacggctgccttctgtgcttccatattgaatggaaagccggtgcccgaagcacacaaactggctgtggaagtctctgcttacgtttgtacgcagagcggggcgatgccggaactgccgcaggtgttgaaagacagactattataatcctattttacatattggcagattgaatcagtatctgttatctatgtagaacctctcaaagttaaatgttatgctttgagaggttctgttttgataacgtatgctttgaaaaagcaagctactggcggtaaaatgagattaacggatataacagatatggagaactttttccgtcttattcaatctgttctttgtgttcttttgaaagaaaaccattatctttatcccgatatagaataggattttgtatggtaagaggtacgatgaagaaagaaaagcacagtgctatgagatattttcgttggacggcaatactgctttgccttattgggataacggcgtgtcggcaggatactccccgttttcgtatcggtgtggcgcaatgtagtgatgattcgtggcgacataagatgaatgatgagatacttcgtgaagcgatgttctatgatggtgtatctgtcgagatacgttctgccggtgatgataaccgcagacaggcggaagatattcattactttatggataagggagtggatttgctgatcatctcagctaatgaggctgcccccatgactccaattgttgaggaggcttaccggaaaggaattccggtcatcacggtcgaccggaaaattctttcggataaatatactgcttatattggtgcggataattatgaaatcggtcgtgcggtaggcaattatatcgcttcccgcctgaaagggaaaggtaatatcgttgaactgactgggttaagtggctcgactcccgccatggaacgtcatcagggatttatggctgctatcagtcattttcccgagataaagctgattgataaagcagatgcggcttgggagcgtgggccggcagaagtagaaatggacagtatgcttcgacgtcactcgaagattgatgctgtgtatgcgcataatgaccgaatagctccgggagcttatcaggctgccaaaaaagccggacgggaaaaagaaatgatttttgtaggcattgacgccctgcctggtaagggaaatggtctggaactcgtgctcgatagtgtattggacgcgactttcatttatcctaccaatggagataaagtactgcaactggcaatgaacattctcgaaaagaaatcttatcctcgcgaaacggtgatgaatacggctgttgtcgaccgtaccaatgcgcatatcatgcaacttcagactactcatatttcagaactcgaccaaaaaatcgaaacactgaacggacgtatcagtggttatctttcaagggtagctacccagcaggttatcatgtatggaagtttgttgattctgttattggtggccggattgctacttgtcgtttataaatctctccgttccaagaaccggttgaatagggaattatcagaacagaagaagcaactcgaagaacagcgggataaattggaggaacagcgtgaccaactgattcaactgtcgcatcaactggaagaagcgactcatgccaaactggttttctttacgaatatctctcatgatttccgtacccctctgactttggttgctgatcctgtggaacaattattggcagacagaacgctgaccggagaccagcaccggatgttgttgctcattcagcgtaacgtaaatattctcttgcgcttggtcaatcagattctggacttccgtaaatatgagaacggaaaaatggaatatactcctgttccggtaaatatcctttcttcttttgaagggtggaatgaatctttccaggcggcagcccgtaagaagcatatccatttctctttcgataatatgccggattcgaattatcatacacaagccgatgtggagaagttggaacggatttattttaatcttctgtcgaacgcttttaagtttacgccggaaaatggaaaaattgccgtccgtttgtccaccttgacaaaagatgatagccgttggattcgttttactgtatctaatactggttcgatgatttctgccgaacatattcgtaatatttttgatcgtttttataaaatagatatgcatcatgccggttcgggaataggattggctttagtaaaggctttcgtcgaactgcacggtggaactatatcagtggaaagtgatgaaaagcaaggaactgtttttactgtcgatttaccggtacggacctgcgaagtgtcttctttggaagattcttccgcaacctctgtttccgaagtatctcccttgaataacgctgtgcccgttgaagaagaggaactggagaagaactatgatgcttccaaaccttctgtacttatcattgatgataatgcggatattcgtctgtatgttcatggattacttcatgcagactatactgtcattgaagcggcagatggttcggaaggtatccgcaaagctatgaaatatgtcccggatttgattatctccgatgtaatgatgcccggtattgacggcgttgaatgttgccgccgtctgaaaagcgaactgcaaacatgccatattcctgttatcttattaacagcctgttctttagatgaacagaggattcaagggtacgacggtggtgcggattcttatatctccaaacctttcagttctcaattactgttggcacgtgttcgtaatctgatagattcgcatcgccgtctgaaacaattctttggtgacggacaggcattggcgaaagaagatgtttgtgatatggacaaggaatttgtagagaaattcaaagctttgattgatgagaagatgggagattccggtttgaacgtagaagatttgggcaaagatatggggttgagccgcgtacagctttatcgtaagataaaatccttgactaattattctcctaatgaattactccgtattgcccgtctaaagaaagccgcgtctctgcttgcttcatcggatatgacagtgtcggagattggttatgaagtcggtttcagttccccttcttattttgccaaatgttataaagaactgtttggggagagcccgacagatttattaaagaggaagggttagaaactttcttcagaaaaatacagccggaatcatgtctgatttatcatgattccggctttaaatatatgttgtgacatgaaacttaattaagcagaatgaggtagtcattcttagggcttacccaccattgcttatgccctttgccttctacccagtctttgaatttaggatatccttttatgaaatcattttcttcaatcatatgattgagtgcagcaggagctttcagtccccatacataattatcctcatttgaatatttggcattttgtgaagaaggatagattcccttataccctttcaaatggatttcagttccatggtcaggtttggctagataaatatctaccattttatcttgtaatctggatagctcgacaggctctttgaaatatatataaatagatgtgttaacaccggaggtggttatgtattccggttctgtattcaggtatttgctacctgccggcttagatggattggtataagaaagaattgcttctccattcggaccttttatgaattctatcccgtctcctgtttcttggaaaattatttcatcaatatcatcgtattttactcctgccagatttatgtaaggagaaaaatcgttaatacctccaagagctctgatctgaaacccgatctgcatgacataagtataccatgttcctcctttgtggaagaaatcctgtaattggtatttgtaccaggctacaaaatcattaaagtcataatctcctaattgaggatacatatcttcaaacataacagtaccatatccgataggatactcgagtatattatcttccatacctggttgcggagtataatctcctttgccaccacctctagttacaacaggagcaactgaaggtttggcatcttcgggaagtgagaaattaatcattccatttgtcacttctgtttctattactttattacctgctgaaacagtctcatattttaaataagccttctcaagataatctggtactactactggcaaggcgggagctgcagggtctatattgaccgtagataacagttgggtacaattggaatctaagaatatagacactaaagaagttgtggaagatacgattttacatttagcgtctttggaggtttcccacgggaaattagcaggaatctctaaatcggtcattttgatttctttctcagattgcttactttcatcataaagattcttctcgcaggaactgaaagcgaatgctcccaataaacaggttgcaaataggatatttttctttttcataacagagtagtttgctttgttagtaactttattgttttaccgttgtaaatttcgtaataatttgtagataaagcaagaaaagttgcaaatattatttttttgttcatttgtaatttgcaaaatatattcaatagttcgtaagaggtatatttatctttcttttgataatataccggatatagattatcaaaaggtaggtttattgaaaaaaataggataaaaggctgttggttatagccaaaagaaaaagaggtgaaagattcataatgattccttttacctcttttttatgttaagagtgtgataaacttcttaatttctaattacatatcgataatctacttcctcccaccatcttttatattcttttccgccgctagtgacccaacctttaaattgaggatatgcttttaggaaattttttccttcgatagcatgatcaaaaattccccatgttctaatcccccatacaaaattatttttgtccgcataatcttgatgttgatcataaaccggttcgtatccttttaaatgaatttcttgtttatgattttctttggcaatatacatatctatattatagtttttatccattacgtcttcgtattcaatcggattttttaaagtgatccaaatctctttaaacttatctggtttagtcatctcattcttttctgtattataatatttatatccgctgggaggtgtaggactcttatatgagataattgcctctccgtttggaccttttatagattttacatttttttcagttgtttctataataatattgtcggcttttacttttgtcagacggatatatggttcatatttatatatacctccgactgctctaatttgaacacttatacacattttatgtgcatagtattttccacgtgagtatttgtacagaattctaagattataccgtgctacaaaatcattaaaatcgtaatcacctaattgagggtacatatcttcaaacataagggttccgttaatactgagaaggccatattcattgctattttttgtatttatgacagctctgcttttaatgttttgtatttgaggagctttaatagcgatttttccgtcttggactggtacaatagatattctatctactccttcatatttcacatatacattttctacgtatgttggtattgctataggaaactctactgattggttatcattagattcgatattcatatccatttggaaaagtaatgcttcttctttacattctttgtctaagtacacggaaactattgtttcggcaggcgtaatttgagctttaacttcttgagtatctgaccaatcaaagtttttgggaactattaagtcagtcattttggtttcttcttcaggctgtttgctttcatcataaaggtttttctcgcaggaactaaaagcgaagatgcctaataaacaagaggcgaacagaaaattcttctttttcataacacttatgtttgtcttgttaataatatggttgtttaacgagtacaaagtacggtgttatttttattaaaaacaattaaagttgcaaatattgtttgttgtatgtttataatttgcaaaatttatactttttgcctagctttggacatgaaataagtgataaaacaatgaaagattataaagtagataaagcgagtctgtctgaaaccttctgccaggaagtgtatcaggtggtgtgtgagattccgttgggtaaagtttccacctatggaagtattgctgcgttactggggatgcctcaatgttcccgtatggtaggacgtgctttgaagcaagtgccggataatgtttccactccttgccatagagtagtcaatgcatcaggacgtcttgttcccggttgggaagaacaaaaacaaatcctattggaagaaggagtttctttcaaacaaaatgggtgtgtagacctgaaaaagcacctttggaattactccgtttctgaataaaatttgtatctttaatctattttgcctatctttgtcgaaataatatgcaaaaacaggctgtcattcatatataaaaatactgtttttactgttcattgagaggataatcttaccaaattctattccttttaaactactcagtctgttttttaatcatttaaaactcataaggttgccatgctatcatgtaatgtggccgaaccaagcgaactttcaacttgtttatcattggtgagaatggtaggcgcgacagttgaaaacaaaacaaatattataatctaaaccaatatattattatatgagcaaaatagaaataaaggatttatatctcattttcggtaatgagaaacagaaagctctcaagatgctgaaagaagataaaagtaaatcggagatcctaaaagataccgggtgtacagtaggagtgaaaaatgctaatatttcaattaacgaaggagaattttttgtgataatggggctctccggcagtgggaaatcgacattactgcgttgtattaatcgtctgatacgtcccacttcgggacaagtacttgtgaatggaatagatatatccaaggtgtctgaaaaagaattgttgcaagtccggcgtaaagaactggcaatggtatttcaaaactttggtctgttaccccaccgttctgtattacataatatagcgttcggtctcgaacttcaaggagtgaagaaagaggagcgagaaaagaaagccatggaaagtatgagactcgtcggattgaaaggctacgagaaccaaatggtaggcgaactttccggcgggatgcagcaacgtgtcggactggctcgtgccttagccaataatcccgaagttcttttaatggatgaggctttctctgctctcgaccccttgattcgtgtacagatgcaggatgaacttctcgccttgcaatcaaagatgaaaaagactattgtctttatcacccacgacctgagtgaagcgattaaactgggcgaccgtattgctatcatgaaagatggagaagtagtacaaataggaacttcggaagagattctgaccgaaccggccaacgattatgtagcccgctttgtagaaaacgttgacaggagtaaaattatcaccgcttcatctttgatgattgacaaaccattggtagcccgtctgaaaaaagaaggtcccgaagtcttgattcgtaaaatgcgtgcgaagaatataacagtacttcccgtcatagatgccgacgataaactggtaggtgaagtacgcttgaacgacctgttgaaactgcgtaacaaacaggaaaaatctatcgaaacggttgtgcgtacggaagtccattccgtattgtgtgatacggtactggaagatattctccccctgatgacaaagagcaattcacccgtttgggtaattgacgaaacccgtgagttcctgggcactattccgttatcatccttaatcatcgaagtaacggggaaagataaagaagaaataaacgaaataattcaaaacgcaatagacttatgatcaatataggacaatatatagagagtgccattaattggatgatggtgcatttttctacttcttttgatgccgtgaattcaggcatcggtagtttcattataggatttcaacatgtacttttcggaatacctttttatataactatcctggcgcttgctgtcgcagcatggatgaaggccgggcgtggaacggctatctttaccgtattaggcttgttgcttatctatggaatgggattttgggaagcaactatgcaaacgcttgctctcgttttgtcgtctacttgcttggctctggttgtcggcgtgcctttaggggtatggacggcgaacagtccgcgtgcagataaaatacttcgtcccgttctcgatctgatgcagactatgcctgcttttgtctacttgattcccgctgtccttttcttcggcttgggagcagttccgggagtgtttgcgactatcattttcgccatgccgcccgtagttcgtcttaccggactgggaatccggcaagtccctaaaaatgtagtggaagcttcccggtcattcggggctacccgctggcagctactttataaagtacagcttcctctggcattacctactattttgaccggagtaaatcaaacgataatgatgtcactttccatggtcgtaatcgctgccatgattgctgccggtggtttaggggaaatcgtcttgaaaggtattacccaaatgaaaatcggtttgggatttgaaggtggtatagcggtggttatcttggctatcatcttagaccgtattacccaaggcatggcaggacgaaaaaacaagaaagactaaaaacagaaaggaaagaaaatgagaatatataaattagtaggaatagtattgtccgccctgcttttactggtttcctgtacgaattcggacgtagataaaaagaaagtgaaaatagcttatgccaattggttagaaggtattgccatgagtcacttggttaaggtggtactggaagaacaaggttacgaagtcgaattgcaaaacgcagaccttgctccgattttcgtatctatgtcaggaaagaaatcagatgtctttttggatgcttggttgccgataacgatgaaagattacttgaaccaatacggagatagccttgaattcttgggtgaggtttatggagaagcacgtgtcggactggtcataccacaatatgttaccattaattccatagacgaactggcagccaataaagaccgtttttcttctgaaatagtaggaatcgatgccggtgcaggaattatgaaaaccacagataaggcgatctctgcttacggacttgacggatacactcttatgacttcaagtagctcaactatgctggcgtctctgaagaaagcaatggataaaggagaatggattgttattacaggctggacaccacattggatgtttgaccagtttgatttgaaatttctgaatgatccgaagaaagtatatggtgaccttgaagagatacatgctgttgcttggaaaggattcagtgagaaagacccgtttgctgctgaattctttgcaagtatcaaattgacgacggaagaacttagttcttttatgacagctatgaaagacgcccgcatggacgaagaagaaatagcgcgtaagtggagaaaagaacattgtgaattggtcgacagttggattccgaaatcaaagaataaataagaagaattcaataaaccaaataaggtcggtactgatttctattcagagccggtttaaataaaaatgggagccgtgcattgagcaggctcccatttttatatgtatcagagtgtgattaattattcagcaccccagttttctctagccagacgtttgtagctgttgtaacgccatttagcgttttcttcagcagctttgaacagttcttcagcttcagtaggatattgtttcattacagaagcgtaacgaacttcacccttcaagaaaccttggaaatcttcccagttcggttctttgctatccaactggaacggattcttaccttctgcttccaaagccgggttgtaacgccacaagtgccagtaaccgcacttaacagccttttcttcttcttcctggctcttacccataccggctttcaaaccgtggttgatacacggagcgtaagcgataatcaaagatggtccgggatatgcttctgcctcgcggatagctttcagagtttgagcttggtcagcacccatagcaatctgagcaacatatacataaccgtaagtagtagccatcagaccaaggtctttcttacgaacgcgcttaccagcagcagcaaacttagcgatagcacccaccggagtagccttagaagactgaccacctgtgttagagtaaacctcagtatccagaacgaggatgttaacatccttacctgatgcgattacatggtcaagaccaccgtaaccgatatcgtaagaagcaccgtcaccaccgataatccactggctgcgtttaacaagatattgttgcagttctgcgatttgtttgcagtgattacatttatctttgttagcttcgacaaccgggataatcttagctgccaattctttcgtcttgtcagcatctagcatattgttgatccattcagcgaacagttctttcacgtcagcaggagtgcagtcggcagcaatagcttcgttcataaccttcacgatacgtgcacgcatcttttcgttagccagttccatacccagaccgaattcgcagaagtcttcgaacagtgagttagcccaagcaggaccgtgaccgttttcgttcttagtataaggagtagaaggaacagaaccggagtagatagaagaacatccggtagcgttagcaaccatttcgcggtcaccgaacaactgagaaatcagcttcacgtacggagtttcaccacaaccggagcaagcacctgagaactcgaacaacggagtagcgaactgagagttcttcacgttagacttgatgtcaaccaagtgttgtttagtcttcacgttattagcgcagtattcccaattagcagcttcagccaattggctttcaagatgtttcatggtcaatgctttgccacccttcttcggattacccggacagatgtcagcacagtttccgcaacccagacagtcgagaacatcaacttggatacggaatgtcataccgtcgaatactttacctactgctttcagttgttcgaactgagcacccttctgttcttctgcatcgagaacgaacggacggatagaagcgtgaggacaaacgtatgcacacttgttacattggatacagttttcaggattccattcgggaacaaatgcagcaacaccacgtttttcgtatttagcagtaccttgataccaagtaccgtcttcgatacccttgaatgcagatactggcagcaaatcaccgtcttgtgcattgatcggacgaactacttcattgatgaatgcagggtcgttgttttcaacttttgcatcatccggcaagttagcccatgcagggtcaacagtcagctgtttgtattcaccaccacggtcaacggcagcatagttcttgttgacaacgtcttcacccttcttgccgtaagacttaacgatgaattttttcatctgctcaacagcttgttctacagggattacacctgtgatacggaagaatgcggattgaaggatagtgttggtacggttgcccaaaccaatttccagtgcaatctgagttgcgttgatataatatacagaaatgttgttctgtgcgaaatacttcttaaccttgttcggcaagttcttagccagttcatcaccttcccaaatagtgttcagcaagaaagaaccgttcttacgcaaaccacgtgttacgtcgtacatgtgcaggtaagcctgaacatgacaagcaacgaagttcggagtgtttaccaagtaagtagaacggataggagtatcaccgaaacgcaagtgagaacaagtgaacccacctgacttcttggagtcataagagaagtaagcttgacagtgtttgtcggtgttgtcaccgataatcttaacagagttcttgttggcacctaccgtaccgtcagcacccaaaccgtagaatttagcttcgaacataccttcgccgcccaaagcgatttcttctttctgagggagagaagtgaaagtaacatcgtctacgataccgatagtgaagtggttcttcggcatcggcatagccaggttttcgaatactgaaaggatctgtgcaggagtagtgtccttagaacccagaccgtagcgaccgccaacgataaccggagcgttttctgcaccgtagaagcagtctttaacgtcaagatacaaaggctcgccgttagcacccggttctttagtacggtcaagaactgcaatagtcttagcagtcttaggtacagcagccaggaagtgtttagcagagaacggacgatacaagtgtacggcaaccatacccactttttcaccgtttgctaccaagtagtcgatagcttcgcgtgcagcttccgttacagaacccatagcgataattacgcgttctgcatcttctgctccgtagtaatcaaacaaaccgtatttgcgacctgtaatcttagaaatttcattcatgtattcttctacgatagcgggaactgcttcatagtagttgttgcatgattcacgatgttggaagaagtggtcggggttttcagccataccacgggctaccggattcatcggattcagtgcgcgggcacggaattcagccaaagcttcctgatcaatcagcggagcaagatcttcgttttccaacatttcgatcttctggatttcgtgagaagtacggaaaccatcgaagaagttcatgaaaggaacgcgtgacttgatagtagacaggtgagcaacaccggccaaatccataacttcctgtacagaaccttcagccaacatagcaaagccagtctgacgagctgacataacatcctgatggtcaccgaagatacacaatgcgtgagaagccaatgtacgcgctgatacatggaatacgcatggcaagaattcaccggcaattttgtacatgttagggatcatcaggagaagaccctgagaagcagtgtaagtagtagtcaacgcaccagcctggagagaaccgtgaactgcaccggcagcaccgccttcagattgcatttcctgcaccaatactgtttcgccgaagatgttcttacgtcctgcggcagcccattcgtctacgtactcagccatagtcgaagaaggagtgatcggatagatagctgctacttcagagaacatatacgagatatgtgctgcagcttggttaccgtcacaagtgatgaatttcttctgtttagtcataactaaattaaatatttaagtaaataaatctttgttagtataaaaagccgaacatccagagaggtatctggttgcctcgacctatttccgccttttgcaacgcgtacgtcacatccgggttattttttatttttgtaccttccgggcaaattttgaacggcattacttcatccaccataaaagaggcatttttgtctcctttatgtattttatggtctttccataaggagttggcaaagaaagtctcaagtacatcctgttcctccacctttaccggataaatcgaatacatcaagtttgagttgtgcatcataatctttgacggttttttgggaaattcttctcctttcggataaaccagattaatgagacgtgcatctgccagatacttgatgtaattcatcaccgttgcgcgggatgtctgtatgtcgcttgccagttggctgacgtttggagctttcggaccgtcgacagccaacaaatatagtaatttttttatctttgaaagatatttcagctcaatttgtttgataagcaggatatctacttccaccatcatgttcattgtcttcagcagattctccgaaaagttacgcttttcgaggaagaaggggtagaatccatgatgcaggtaatcctgaaagtaatccagcggacgtactttggaaagcactcctttggcaatctgttcgtgtgtactgagaatctcttcgagactgtacgcccggaatttcatacctgtttgcaggttcagaaattcgcggaaagagaatccgcgaagattatagcttttcgcaatatcacgcaattcgaggttttcttctttcagccgcatcacggacgaaccggtgaatacgattttcaggttcggataacggtcgtagcacatacggagttctttgctccattcgggatgcttaaacacttggtcgatcagcagaacttttccgccacgtttctgaaactcgttggcaaagtctacgatgctatgccccgagaaatagaaattgttcatgttgatgaacagacaggaacggtcggttccgaatttctctttggcgtattggagaaggaaagtggtttttcctacgccacgtgtccctttgataccaatcagacggtcactccagtcaatctcgtccataagatcgcggcgaacgggggcattggtgtgctcaacaaggtaagcgtgtgtgcgatagaatgattccatttcagttctttgtttttcgggtggcaaatatagtgctttttttaggatttgcaaagtagagatagcaaaaatgtgcttttaaatacaactttctctttattgtgaagattcctgtttatttcctgtatatatttgcagaataaagcattgattgcatttggtatggctaaaaagactctttatatattcaatccggagcatgatttggcgttggcaagtggtgaaatgaattatatgccgccggcttctgccaggcgtatggcttccgaactggctttgcttcctgtgtggtatgcggaacggggaagtgcggtgctggcttcttctgcttataatctcgattatttgaagcggatgcaggagttgttggatattccggtctatttaatgacggaaccggaattggctgccgaaccggcattggatatccgtccttgggggtgggatgcggctttacggaaacgactttcaggactgggagtggatgaatccctacttccttccatgcaacaaataagtgtatggcgggagtactctcaccgttctaagtccgtatcgttacttcctgaactacagttgaatgaacatttctgtggagaatcttattatctgaaaacgccggaagaatggaaatctttcgtggaagaacgggaagggtgtttgttgaaagctccgctttcgggaagtgggaaagggttaaactggtgcaaaggtacatttactccttttatctccggttggtgcacgcgtgtggctgctttacagggaggggttattgcggaacccatatataataaggtagaggattttgctttggagttttattctgacggggcaggtgaagtgacgtttgccggatattctcttttccgtaccggaaagagtggaatgtatgaaggaaactacctgctctctaatgaggcaatccgggggaaactttcacaatacgtacctttaggggctttgacggacttggagagtcgtttgaagtgtgagctttctaagtcggtaagctctgtttataaaggttatctgggagttgatatgatgatttgccggttcccggaaaatgaaaaaacagcttttcggattcatccttgcgtagaaataaatctgcgcatgaatatgggagtcatgacgcgcttcctgtatgactgctatgtacatccggattcagcaggatgttcgggaattgattatcatccttcggagggggaagctttgaaggaacatgaacggatgtcggccacttatccgttggaaatcagggaggggaaagtatgctccggctatttacctttggtgcctgtccataagagaagctgttaccgggcgtggatgttggttgctccgactcattgaaaaaggaatggtgtgggcttggttgtttttgatataggattcatcccattggttacctgagattgttaatttttcatttatcgttagtagagtattttatttaagctatctttgttcatatttttatagtcaaaataattatattatatgaaaacacaaagaataaaaacacttcttctttttctgtcaatgataccatttataggtatttatgctcaatcaatatactacgtttcccctcacgcatcatcgggtggagatggtagtcagtcggctccttttcattcaattcacgaagctgtcgaaaaagcccgaaaggatcaaaatagcactacaatttacttgcgggaggggaaatatgttttagataagcccttgatgctgacttctgatgatggaaatgattcgaaagaattgataataaagaattatcccggagagaaaaccgtactgtcgagtgggattgtactggacttgaaatgggagaaatataaaaacggtatcatgcgggctgtagtaaaaggaagtccggttatggatatgcttttcgtaaatggagaattgaaatctatggcacgttaccctaattatgatgaaaaagctgttcgttttaacggcacatctgctttggcaacagccccggaacgagtaaaaaaatggaaatgcccggaagggggataccttcatgccatgcataaacatgattggggtgattttcattatcgtattacaggcaaaaatgaaaagggagagttacagctggaaggtggttggcagaacaaccgtcctatgggaatccataatgaaaacaggatggtggagaatatctttgaagaattggatgctccgggagaatggtactatgataaaaaagaaggctggttgtattattatcctttacctgatgaaaaaataaacgaactgacgtttgagaccccgcaacttaaaaacttgattgagtttgcgggaacttcatccgagccggtgaagaacataacgattcaaggaattgagctgacacaaacgatacggacctttatggaacagtatgagcctctgctccgctcggactggacaatatatcggggaggaaccgttgttttcaggggaacggaaaaatgtgctctgcgtgattgttatatccataacgtaggagggaatggtgtcttttttgataaacctcaaatccgcaactacgcgcctaatatgatacagaagcgaaaagaatctgcatcgttagtaaaaagggggcacagtgcatcgaatgtcaccataaagacatataaatgccccttaccccaccatgcgacttgaggcaatacgcaaaatcacgactataagttgtcggtgttatccaaagtcattctggaacacattggcataagcattgttgcatgaatagatattcagcacatacttccttgatgtcctgacccatttggctggcacagagatgaacttaaagacaaacgtcttgatgcggcttgttgctttgagtccgaacctcttcacgtcaagcctcgccatgatgaatttatagaagttgcgtatgagtgccataagcagaagaaacaccgtgttttctcccataaaggattttggaagcctgttccagccgaatccgttattcatatcatcgaagatgcgttccttccctccacggaggttatagaattcgacaatctctttctcggaagactcgtagtcatttgtaaggatgcagcggtaggtgtattctccttcccacaggtcgagttcgccgtctatccgcttctgtctttgaatcacaagacggtatgccttccctttccatttctcgatgagaatggaggccagctcaaactcaatgccgcccaattccactttcttccaacctctgagggcaaagatgtcattgtagagcgaactgcatcggttagcacggatatagaaggtcttgcagtgtttagcaatctcttccactatctcttcagaacacgagccgcaatcagctctgaaacggttgataataagcttgttttgttcaaacctttcaaagaacctcttcagcgtgtccttctggtggaaacggacatttgtgttgccgtcgctgttctcaatgccgacaatcaagttgccaataaccgccacgccagggcgataaccaaggaacttcttgtatgtaggcttcgcatcaaacttctcagcctctatgaactggtggtcgaagtcaacgtcatacccctcgccctctttcagctgccctgtggacaataggcaattgaggagcagtgtattcagcttgtctgccgtgttgaagtcgtaggtcttgccagtgtcggatgtgtaggaaatgttatcctgggtcagttcctttatggctctaagaatcgtgtcggcactgcatgtgcgaagtgtcggatgaagcgaaaggtggtacatcagatgagtggtgacatcctcgatgcatgagccgccacaaaaataaacgctcataagcgaacggatgatttcgctgtattgataaccatacagcctgcatctcataccgagggttgagtcgattacagatgagagtctggagtcaaattgctccattattgaaaatattcctccaaaaggagtgagtttctcggatttaattgctacctttgccatgtctgtcgggtttgatacatattttgatttgcaacactaagataggtgaaaaatctgacatggcaaattcctgagcaactttttgttgctcaggtacttaaaaagttatatttgtaatagtgttgcggaattaaggataaatataatcgctattcggcagtgaccggttcttatctgacttctatcggagccagtgccatttgcttcgtcggggatgtggcgggagtacgttcgccgagttttaggtatgggaaatttgttcctttggataaaatggattatacgaaagggcctcagaatgacaatcatcctgcttattgcgaggtctctgataacttgatatgtacaatcggtttgtttgaaaagcagattaccggagtggagctttccatgtgtcgcaacataacggtaagtcataacagtatttacaatactccccgtgccggaattaatatcagcgaaggcacatggggaggacatattatcgaatacaatgacatttttaataccgtgaaggaaacaggtgaccatggaactatcaactcctgggggcgtgaccgtttctggcatccgaattataatataatgacgcaaataacgaatgaaaagcctgcgttgattttggcagacgtggtcgaacctatcattatccgccataatcgtttgcgttgtgatagaggatgggatatagatttggacgatggttccagtaattaccagatttacaataatctttgtttgaatggcggcattaaattgcgtgaagggttttatcggactgttgagaataatattatcgtcaataatacgcttcacccgcatttgtggtttaaaaatagcggagatgtcttttcacgtaacattgtaatgaccaaatataaacctataagtgtgcgtggttggggcagagaggtagattataacatatttgcagacagtttggcgtatcttgcagctcgccaacttggtggggatgctcattctatagtaaccacagtcaagtttataaatgctgcgaaaggtaattttaatgtagctgacgattctgaagtcgtaaccaaaggaggattccgtaattttccgatgaataatttcggagtgctgtcttctcgtttgaaacggttggctgcaagtcctgtgatgcccgttccacttgtggcaggtcatgcaacggatactaaaacgatgttttggaaaggggtaacgtttaagaatctggatacattggaggaacgttctgctacgggtatggatacggaacggggagtttatgtcgtttctgtagatgtcttaggtagtaatcaagtccgagattttattgcttcgaatgatgttattcttagtgtaaatggaaagccggtcaataatttagatgatatggaggaggcgttgaagcacgtggatacaagtaaaaaggcagagcttgttattttcagaaatcagaaggaacataaagttgttattcctctttgatttttatccgtgtttttacttattacataatgaaataaatgtctgtcatatctatcattgattttaatattcttctaattatcagagaaataagtatgatagatgccttctattagggggtatctatcatacttttactgcaaaaaacagggtatctgtcatagataagacaactggataaaggtcgcgtaagctggcttgtttttattgtaatgggcacgcataaatccgattatcatggcttaataatccgccttgaaaggcgttaaatttatagcccacagctgtgtgacgtacagcctccatacgtgtgctgtacggtttgcatgcgtgggctgtacagcctgcgtctgtgggctataaaaagactgatactccaaccggattattaagctgcaaaatacgggttatcttactgtaaaacgtgcattcttatgccttatgtagtatttaatccggctctttgctcctgggtagggggaagttatttctgtgccgctgtactttcattcccgtaacggtctacggctgtaacggcaaaatgctttttggcattccaaggcaggataggggcgtagatataacttgtctctctgatattctgtgcaacgatattttccggccgactggtgtctaccggatattcattcgatgcataaataatgtacatcggattattacgtggatcattgtcggtagcggcctgccatttcaattccgtatatccactgtcgatagtccttactttcagtccggacggagctgtgggcggaacattgtccaaccagggcatcggtggctgtaaagccgggtatgcgtagaagttctcgattagttcatcatagatgccttgagtgttctccatgagatattttacccggtagtggccttcacccgccattttatgattccggatgaagtttatttgacggtctatctcgtcccgtgtccatttaccttcgtcgggatgaaggaaatagatgccgagccccggaattacttgtcgtccgttgctttgctcctgccagtcaagggcaaaaggatagaaactgtttccctgaaaatacatcattggatatatctggtccataataccttcgccaagccagccttgcgggtcttgataaacagtaaagaaagcgttccacccacgggaaggataacgcgaagtatcccggtatttcccaaccggactggcgctgagcttcacccaaggcttcattgcttttacacctttatatatataacgtacaatttcagaaatattatcccgccgccattggtccagtgtacgccctttcccgtatcggcggaaatcatatttgtcgggaaagagaggagcattctccggataacgcagataatcgaaatgtaccccgtctatatcataacggctcacgacttcccgtaccagtttcatcaaatattctttagttcccggatgtccaggattaaggaaatattcgttcttgtaaggtacgcaaatatctttcatccgcttggtgacggaccggttgccgagcgaggcaacgtgtttcctgtttcccaacggaatagttaccatccaggcgtggcattccataccccgcttgtggcattcttcaatggcaaaagcgagcggatcataaccgggatttccgccggatttccctgtcaggatagaattaaaaggttcgatagacgaaggatataacacatccccgcgtgtgcgtgtctgaaacaggacagtattgaaattggcagccttcagtttatcgaggatatccaccaattcttccttttgcttgcggatactttgaggactgacagcacgtgtgcggggccagtcgagaccatacaacgctgtgagccatgcggcgcggacttcatgtttgggctgcgctgccacggagaggaaaggaaacaaaagtgaaagaatgagaatagataggcgcatattctttattttttgttttaaatccctgcaaagttagtaaaagtgtcggtaatgttgggctgtttcgtgagattatgttacatttgccaagctaaaaaaacgacacactatgataacatttactctatgcctactggcgttgatagtaggctattttacgtatggacgtttgatggaacgcgtctttggtcccgacgaccgtaaaacaccggctctgaccaaggctgatggagtagactatattccattgccgacctggaagatttttatgattcagttccttaatattgccggactaggtccgatattcggtgcaataatgggagctaaattcggtagttcttcttatttatggattgtgttgggaagtatttttgccggggcggtgcacgattattttgccggaatgctttccttgcgtcatgagggcgagagtttgccggaaattatcggacgctatttgggacttacgacgaaacagataatgagaggtttcaccgttatcctgatgattttggtcggttcggtttttgtggccggtcctgcgggattgctggcgaagctgacgccggaaagtctggatgctacgttctggattatcgttgtgtttgcgtattatattttggctacattgttgcctgtagataagattataggtaagatatatccgttgtttgcaattgccttgttgtttatggctgtggggattctcgtcatgctttatgtgaatcatcccgctttgccggaactgtgggacggactgcaaaatacgaacccggaggcgagtgaacttcctatctttccgataatgtttgtgagtattgcctgtggtgcaatttccggtttccatgctacacaaagtcctttaatggctcgttgcatgacttcggaacgtcatgggcgtccggtgttctacggtgcaatgataaccgaaggcatcgttgcactgatttgggctgccgccgctacttactttttccatgagaatgggatggaagaaagtaatgcttccgtcatagtagatgcaatcacaaaagagtggctgggaacaatcgggggtgtgcttgctatcttgggagtgattgctgctccgattacttcgggcgatacggctttccgttctgcccgtctgattgtggcggatttcctgggcttggaacaaaagagtatgcgtcgtcgtttatacatctgtattccgatgttcgtggcggctatcggtttacttctgtatagcctgcgtgatgcgaacggatttaatatgatctggcgttattttgcctgggccaaccagacattggctgtgtttaccctctgggcaataacggtttatctggcggtatccaagaaaccgtatgtcattactttgatacctgccttgtttatgacaagtgtgtgttctacttatatatgtattgctcctgaaggtttgggactgtcgcacgcaatctcttattacatcggtgtaggatgtgtggtggttgctattgtgtggttctttgtctggctgagcaagcagaaaacaagaaaattatcagaatgaagaaaataaaaagatcaacgggagttgcacttgcattccttatttatgtatccgtgacggcggcttatctgttaccccgtaatacggaagtgagccagacggaaaagtatctgacggtggcgggttcttatgtcattgtcctgcttctttggcttgtcctccgcaaaaaggaacagatgcgtgaacgccgtaaaaaagacgaacaatctattcacttaaaaaagtaagtttatgaagaaattagctttagctatttgtctgctgttggcatcaatagctgcacaggcacaatttgagaaaggaactatgattctaaatccttccgttacagggttggacttttcttacagtaaaaatgatgatgctaaatttgggatcggcgcgcaagccggtacatttctggcagacggttttgcattaatggtaaatgcaggagctgactggtcacaaccggtagatatatatacattaggtacgggagcacgttgttattttaatactacaggtgtttatatcggtggtggcctcgattgggaacgcagacgttataaaggtggcggtcataacaacgattggggattgggtatcgaagccggatatgcttatttcctgtcgcggacagtaactatcgaaccggctgtttattataaatggcgttttgatgactccgataattcacgtttcggcattaaagtaggattcggattctacttttaaataatttgagaatggagagtggagagttattgcgctatatttgctgcaaaacatctctcaactctccatttctgactcttgacttatttcagcttttctttcaggaactgacccgtatagcttgctccgcaagcggctacttcttccggagtacctaccgctacaatgttcccacctttatctccaccttccgggccgaggtcaatcacataatcggcacatttgataacatccatattatgctcgatgattacgatgctatgtccacggcggatcaaggcgtcaaaagcatccagaagtttacggatgtcgtggaaatgcaaacctgttgtcggttcgtcaaagataaacagagtcgggtcggctttctcctgactcagatagaatgctagtttcacacgctggttctcaccaccggaaagagtggaagaagattggcctagtttgatatacccgagtcctacatcctgcaacgggagtagcttttttacaattttcttctgtccgtgttcattgaagaattcaatcgcctggttcacggtcatttccagtacatcaaagatgttcttgtcgtggaatttcacttccagtgtgtcggatttgaaacgtttcccgtggcaggattcacattccagaacgaggtctgccatgaactgcatttctacggtaatggtgccttcacccttacattcttcgcaacgtccgccttcactgttgaaactgaagaaaccggcggtatatcccatttgtttggcgagtggctgctccgaccatagcttgcggatttcgtcataagccttgatatatgtcacgggattggaacgggatgatttgccgatcggattctggtctacaaattctacattccgtaagtcgcgcagactgcctccgatagatgaaaattctcccggacgatcactgcattcgtccaactcacgcttcaatgcccggaagaaaatatcacgtaccagcgtgcttttcccggaaccggaaacgccggtaaccactgtcattacattcagcgggaagcggacgtctactcctttcaggttattctcgcgtgcacctttcagttcaatataattattccacggacggcgatgttgggggacgggaatttcttcttctcccaaaagatagcggacggtataactgttgcttccttttttgaggtctttcatgtcaccctgatagacgacttctcctcccagacgtccggcgttgggaccgatgtcaataatataatctgctgcacgaatgatttcctcgtcatgttctacaactactaccgtgttaccgagttgttgcagttggcgcagcacattaatcaggcggtcggtgtcacggctgtgcagaccgatactgggttcgtcgaggatatagaggctacctacaagactgcttcccagtgatgtcgccagattgatacgctggctttctccacccgacagggagttactgagccggttcagtgtcagataccccagacctacatcaatcaggaaacggatacggctgtttatttccatcagaatccggcgggctacattactgtcgtgctcgttcagttccaagtgatcgaagaactgctttaattcggaaataggcaggtctaccagttcggaaatattctttccgcctacgcgtacatagccggcttccggtttcagacgggtaccgtggcatttcgggcaaagtgtttttccgcgataccgggcaagcatcacacgatattgtatcttatattgattttcttcaagcatcttgaagaagtcattaataccgtggaaatattggtttccttcccaaagcaaccggcgctgtttgtccgtcagttcataataaggagtgaaaatcgggaagtcgaatttctccgcattgtggatcagctcttctttccattctcccattttttcaccgcgccaacatacgatcgctccttcataaacagataaagaacggtcgggaaccaccaaatgctcatctataccgataactttgccgaagccctcacaggtggggcaggcaccgatcggggagttgaatgaaaacatctggtcattgggttcttcaaaagtgataccgtctgcttcgaactttgtgctgaaggagaacagttgtgttgttccgtccggcaggtaaaagcgtagcatacaggttccgtcgccttcgtacatggctgtttcggcagagtcggtgaggcggctgatagcatctttggtgtcggctactgccatacggtctaccagcagataaacttcgtcgcctgctacgggcttgtattcatcaatacgtttcatctcaccgttcacttcgatacggttgaatccctgtttgaggtctatttccagttgctgttgcaggctgcggtcttcacgcaggtggataggggtcagtacggtgtatcttgtcccttccgggtgtgatagcatacagttgatgatgtcttccgtcgaatgtttcttcacttcctgtccgcttacagggctgtatgtcctccctacacgggaatacagcaaacggagatattcataaatttctgtggaagttcctacggtggaacggggattgcggctgtttactttctgttctatggcaatcgcaggcgggatgcctttgataaaatcgcattccggtttgctcattcgtccgagaaactggcgtgcgtagctacttaggctttctacgtagcggcgttgtccttctgcgtagagggtgtcaaaagcgagagatgattttcctgaacctgataatccggtgatgacaacaagtttgttgcgtggaatatctacatcgatgttttttaggttgtttactcgtgcgcctttgatcgaaatatagttattttctgacataaaatgctccttgttttatggtagtcggcaaagttagcgaatttatcgggagtttgtattatctttgcgtcacattattacgatttaagaatattatgaagctgaaaaactatcttttacttttggctcttcttctggctgtgggagtgagggcacaggtgccgacgggcgacaaatatcccaaacgtgagtttcgtgctgcatggatacaggctgtcaacggacagtttcgcggtgttcccacagaacgactgaaacaaacactgattagccagttgaactcgcttcaaggggcgggtattaatgcgattatctttcaagtgcgtcccgaagcggatgcgttgtatgcttcgcaacatgaaccgtggagccgttttctgacagggacacaaggacaaatgccttcgcctatgtgggacccgatgcagtttatgattgaggaatgccggaaacggaatatggagtttcatgcctggattaatccttatcgggtgaaaacctccctgaagaaccagttggcgccggaacatatatataatcagcatccggaatggtttgttacttatggagaccaattgtacttcgacccggcacttcccgagagtcgtgaatatatctgtaagatcgtgacggatattgtgtctcgctatgatgtggacgctatccacatggatgactatttctatccttatcctattaagggagtcgattttcccgataacgcaagttttgcccgttatggcggaggctttactaacaaggcggactggagacgtagtaatgtgaatgtgttgattaagaaattgcacgaaaccattcggggggtgaagccgtgggtaaagttcggaatcagtccgttcggaatctatcgtaatcagaaaagtgacccgttgggaagtaataccaatggcttgcagaattatgacgatctgtatgctgatgttctgctctgggcgcgtgaaggctggattgattataatattccgcagatttactgggaaatcggtcataaggcggccgactatgagacattggtgaagtggtgggctacgcattcggagaaccgtccgttatttatcggccagtcagtgacaaatacgattcagcacgctgacccgcagaatccttctatgaatcagcttccccggaaaatggctttacagcgtgcttatcagacgattggcggtagctgtcaatggtatgcggcagctgttgttgaaaatcagggaagatatcgcgatgcgctggtttcggaatatcacaaatatccggcattaatccccgtattcgactttatggatgataaggctccagacaaggtgcgcaagatgaagaaaatatggactgaagacggctatgtgcttttctggactgctccgaaagctgaaacggaaatggataaggctgtgcaatatgtggtctatcgttttggcagaaaagaaaaggtgaatcttgacgacccttcacatattgttgctatcacccgtaatcctttctacaaacttccatacgaaacaggaaaaacaaagtaccgctatgtggtgactgcgttagaccgtcttcataatgaatcgaagtcggttagcaagaaagtaaaactgtgataaaagtaaaactgtaataagtgaagaatagaaaaagaggctgactaacaattcagtagtatcttcaattctcctccttcgggaaggaggagtccccgtagggggaggtggtaggaaaatacataagtcgtttattttcaatattgtgtatccgcctaccaccccagcaattaataaagcaataatcctgcaatgccgcaggctataatcattaatataggattagctttatattttctggttccgatgaaagcgactagaaagatgataatactgataacgaatgagtaagtgtcagttgtcggtgaaccgaaattttctacattcatcaataccagtgcggcggaagccaacaggccgacaactgcgggacgcagtccgctaaatatggattctactaccggatgtttctgatatttcaggaagaatttgctaatggtcagcatcaagatgaaggaggggaggactacagcaaaggtagcaatgaccgatcccacgacactccccgtagaggtgaatccgacgtacgtagccgcattaatcccgataggtcccggtgtcatttggctgattgcaacaatatccgtgaactcctgcgagctcacccaatcataacgggttactacttccccttgaatcatggagagcatcgcataacctcctccaaatccaaagagcccgatcttaaaaaacgtatagaataactgaagatagatcatctctttttaattttttaccatgaatcttgaataatgaacagggaacgataactctcgactctccattctcaactttctacttttctaaattttccccagaggaagcctcccactcccgcagcaataataatccagataggcgagaaccccaatagccagatcagcagtgccgaaacaacaggaatccacaggttgtggcggttgattttagcggaccggcccattgtgaaagtcggggcggcaataagtgccactaccgccggtcggattcctttgaagatgcgttccacaatcgggttgtctttaaaactatggaaaaatagagcaatcgccaatataatgatgaaggaaggcaaaattgttcctaatgctgtgataatacttcctcggataccacgcaacttgtatcctataaagatagaaatattgactgccaaaatgcccggagcagattgggagatagccagcaggtcgataaaatcttcctgcgcaatccatttccgcttcgtaacaatttcattctcaataagcggcaccattgcgtaccctcctccgatagtaaaggcgcctattttaaaaaaaattccaaatgattcgagatagatgttcattctttcttttctcctcctttcttgtttgttctcttttctttgccgtattggctgggacttacgttaaaatgcttcttgaatacttcacggaagtatttcgcatcactgaatcctgtcatttctgctatttctgttatgctatgtgtgttctctttcaataattgcacggcatacttcaaccggatcagacggatataatctcccggagcctggtcggtcaatgccctgagtttgttgtagaaacttgtacggctcatgcctaccaggttgcaaagtacatctacggtaagggccgggttatctatattgtcttttatatgctttttgacgttggcaataaacttccagtcaatgtcctgtgagcagttgatgcattcgtcatcttcttcctcatcatccagctccagattggcatacttactgcgcaaaagagcacggttagtcagcagattgtcgacagtcgcttttaatatacctatattaaacggtttcaagatgtattcgtcggcaccgattttaagtccggacaagatatctttctcattattcagagctgtcagcaggataaccggaatgtgcgatgtctctatgttgtttttgagttccttgcataattcgtctccccgcatttccggcatcataatatcagagataaccaactccggtttgtattcggggatgatcgtcaacgcttcttttccgttggaacacgtttgtacagtatattcttctgataatgtctgcaacagatagttgcgtaattcatcgttatcctccacaatcagaatccgccggtgttcaccgttcaacttcttatgtgcgttttcgtatatttcgggtgagggagcaggtacattgcttagggttctgttttcctgacgttgtttgctcagtgttgccagatgtgccttacggaaacgcttgctgtctttcgggaaagataccttgataaccgaaccttgattttccacactcgacaaattaatcttacctttatgcagccgcactaatttccagacaagcatcagtccgatcccgctacccgtcactttggagttgattgcattgctgccacggaaatgcagcttgaacagttttttctgttcgctggccggaattccgattcctgtatccctgacttcgacgctccacgagtctgtattgtcggacacgaaaatctgtacattaccgttttccggagtgtacttcaaggcgttcgagattatgtttttcaggattgattccattttttccttatcaaaccatacattcatatacctgaaattactttcgtgggtgaagttgatatgtttgatattggcgtactgctggaaagcattgtatatttcggttgtaaatgtgttcagttcatgttccgaaatatatagttcggaggaatatacgtccgccctctcgaagtttattagattggtggtgagacgtagcagggcatttacattccgtaatgcagtattcatattggatattccttccttgcttagttcttctttttcacgaagatcttccagtggcgctttgataagcgtcaacggagtacggatgtcgtgtgcagtgttgataaagaaatgaatcttttcgtcggacactttacgttgtttccttaggatcagaatacgtaatgagacagcagcgataaagacaaggataacgatatagagcaacattgcccaaacggtcagccaaaaaggctgggcgatgataatatctatactcctttcttcgagcataatacgctggtcctcattggagatagcacgtactcttaacgtatattttcccggtgcgaggttagtataacggattgtgttttctgtccccggtttgctccattcttcgtaaaagccttccagtttccaggaataaaggacattagaaggatagtcatagttgatagaagaaacctgtaacgagaaaatattctggttatattttaatttcagctctttcgtattgttgatacttgcttttagcggggaatttttgtcccctgggtagatcgtttgataaaacagtttgaaatcgctgaatatcattttggaagaataggttctgggaagtttcatgtctttattgaactctactgccccgttcgaacttccgaaaataaagttgttgttctttcgcagggtaccggacaatgcattgaaatgtgtggtcataagtcccatttcttttgtccagttgtgaaatgttttttggttaggataaaagctggtcagaccgctttccgtgctaagcagaatatcttcgtcagcgtctgaaagcaaggtatagatattgttggaaatcaatgcgcaatttcccgtatgataatgagtgaacagtttggtgtgaggatcgtaaattaataatccggagccactggttcctatatatagcgatcctttcttggtctggtataaagaatatatatagtttgattctacgggaagtttgatacgttcatatttacccgattctttatccaataaaaacaatccggtcgcactgcctatccacatacttttggcatcgcgttcgagaattgcagtaatggagttcagtccgtggtacagttgtatatttttagtgtgtacattgatacgtttcagattataaaatcctccgctccagatatttccttgtgagtctttacggatatcacgtatatacttatccgggcgtatgttctcatatgcatacgaagccggagtaaaatagctgacattggaagatctcttgtctatctgataaatgccggagaagtatccgccggcccagacaactccgggaagcacttcgcacagggtagtgaaaatatgacttctgctatcctggttcttctcaaaagaactgaggaaggaacgccattgtccggtcttggaatttaagagactgattccattattggttccgaaccataagtcaccgtcactgtcttcgataatcgaattaacctggtcgtttatcaaagactgtctgttgccgatagaatgcttgatccatttatagctggaatagcgattattctgtacggtgattccgatagggtagttcgccaaccatatccgttcttcttcatctatataaagatcattgatactgttgccgttcatgccgttattactgttgtaatcagcaataatgtaaggctccatctgataggtttcaacattcattttatgtacaccgccgccatctgacgctatcaacaattctttggcgtttaagggcttgattcgtgtaatgctgatatctttcagactatgtggaggttgtgtgacggacttggttgacatatcatagatgagcactccccgttggaaagttccgataaacaatttacgaatctttgtgtcgaaatgtagatcgagtatttgtgctttcacattctccagcttgtcgcagtgaataagttccagtgtgttgttttccaacttggcatagtggattcccatttccgtgccaatgaagtaatgtgtgtcgtcaatctgttcgatgtcattgatttcttcactgatgtcattctttatgtgagtgacttctcctgtatccgtgttataaataaagatagtttcctcattacacaaccagatatgcttgctctgatcgagccatgcgaaacttaccggagccggcaaatcacggaagttctctatgggcagtttatatacgagtgtgaagcagtcgtggatctggtcataccggaatatctttccttttttcccgatttcccataatacgtcttctttatcaatatatagccaattgaggttcagtagcgaattaacctctacgtcaccgtccattagtttgtatcgtttgaaatcttttccattgtatctgtcaataccttcatgggtgaggaaccacatatatccggttctgtctttctggatatagtaaactcgccggttgcttagcccatcttccactccaatatattggtacgtctgagcgatacaggttagaggaaacaataagattagaaaaatccattttttcatataaataggacttttaagggttattgaatcttgttctgagggggaaagtttgacaaaattaagaagatttttcgacactacaaaattttggagtaaggattacgtcgtacttgaattgaagcggatgaggagctttttcagctatttgtatttagtgcttatttgtggaactttagttgtatataaacgaatttaggtagtaggaatattgggataaactaaaaggctggtactttttgggaagtaccagccttaaaaaatataaagcaattatttatctcaccttttcttcaatccacttgcgggcattgacaaatgcttcaatccacggagttacctgatcgctatttttgcggtctgccggataacaaccgttctgccatgggaagatagcgcgttccaagtgaggcatcatagccagatgacggccgtcggcgctggcaagtccggcgatagaatagtcggaaccgttcgggtttccgggatattcgtcatagctgtattttgccactacattatatttgtcttcatcgtaaggcagagagaattttccttctccgtgagctacccagatacctagtttgctaccgctcaatgaaccgaacataacgctgcggttggtagggatagtcaggccgacaaaggtagactcgaatttatgggaatcattgtgaagcatcttacctttctttttgtgttcaggattgataagtccaagctccatcatcaactggcaaccgttacagatacccagtgacaatgtatcttcacgagcatagaatttatcgagtgcttcttttgccttttcgttgaacaagaaaccgcctgcccagcctttggctgaaccaagtacgtcggagttggagaaaccgccgcaataaacgatcatgtttacgtcttccagtgtttcacgtccgctgataaggtcggtcattgtcacatctttcacgtcaaaacctgccaaatagagtgaataagccatttcgcgttcgccgttcgttcctttttcgcggatgatagctgcgcggacaccgctcggagtacgacggtccggagtaataccgtattgagaaagtttgcctttgaattctggcatgaaagcaaattcaaccggctgcatcttgtagttttcaaaacgttttttggcgcaaccgttcatggattgtttgcggtcgagcaggtaagaagaagaataccatacatcacgcatatagtcgataccgaattggtaggtagcgtctcctttggatacgaggatgtggcgttcgtcggtaggtttacccaacttcaggtagcctacgcctgcgtcttccagaatcttcttcacctcttctttgtgcttgtcgctgacctggataacaatacccggattttctgcaaacagaatcttgacaatatcctgttccttcatcttgtcgaggctgatttccataccgccttccacattggcgaagcacatttcgagcaatgtagtgatcagaccacccgcagaaatatcatgtccggcaagaatcaatcctttgtttaccagttcctgtacggcaaggaaagcatcgcggaaatactctgcgtcttgtacgcaaggcacatcgtcacccactttgcctaatgactgtgcaaaggcggaaccgccgagcttcagttcgtcgaagctgaagtcaatatgataaagagttgttttttcgttgtttaccaataccggagatacaaccttcttcacgtcggaaacttcgccgcctgccgatacaattactgttcccggagaaattactttttcgccgttcggatacttctgcgtcatagacagagaatcttttccggtaggaacgttgatttgcagggcgcagcagaagtcgctcaatgctttcacggcagtgtagagacgagcgtcttcaccttcctgtgaacggcaaggccacatccagttggcggacagggagatgctgtccatgccctctgccataggagcccagacaaggttagtcagtgcttcggatacagaaagtatagaaccggcagccggatcggccaatgctgcttgcggagcgtgtccgatagaggtagcgatacctttctcgccacggtagtcgagtgctacgacaccacagtcgctcaacggcaattgaagttcaccttggcattgctgacgggctactttacctgttaccgaacggtctactttattggtcagccaatccttgcaagccactgcttcgagctgcaatacattggtcaggtattcatgcagttgagacaattcgtatttcggcatttcataatgacgttctacggttttgtctatcatatatgtcttgggagatgaaccgaacatctgttctacggcaagatcgaacggacgtacaccgtcagcttgttggaaagcaaagcggtggtcgcctgtcgtttctccgactacgtacatcggggcacgttcacgttctgcaatcttgcgcacatgttcgatagcttcttctttgataagaagtcccatacgttcctggctttcattagcgatgatttctttggcagacagcgttttgtcaccgataggcaacttgctcatgtcgatcagaccgccgcattcttccaccaattccgacagacagttgacgtgacctgccgaaccatggtcatgaatagaaacaaccggattcacatcttcttcacaaagggcacggactacgttgttggcacgtttctgcatttctgcattcgcacgttgcacggcgttcaactcgataccactactgtaacgaccggtatctactgaagatacggaaccgccgccaagtccgattcggtagttgtcaccaccgataacgactactttgtttccggcttccggtgcgcctttcagacagtcgcgctgtgtaccgtagcctacacctccggcaagcatgataactttgtcatagccgtaaacctcattgttctctgtatgttcgaaagtcagtaccgaaccgcagatcagtggctggccgaacttgtttccgaaatcggaagcgccattggacgccttaatcagaatctgttccggagtctggtacaaccatttgcgtaccggaaggatttcttcccattcgcggccttcgtctgtgcgtgggtaagaagtcatgtagacagcagtacctgcaatcggccatgaacctttaccaccacccatacggtcacgaatttcaccgcctgtaccggtagaagcaccgttgaacggttctacggttgtcgggaaattgtgagtttccgcttttagcgagataacactcttgatgtccttgatctggaagaaatcaggttttgagtggtctgccggagcaaactgttcaacaaccggaccttctgcaaaggctacattgtctttataagcagaaatgattttattcggattttcttgtgtagtctttttaatcatctgaaacaaggaggattcctgttccacaccgtcgatgatgaacgttccgccgaagatcttgtgacggcagtgctcggagttgatttgtgcaaaaccgaaaacttcggagtcggtcagtttgcgtccgaggtcgttttctacttttttcaagtagtccatttcttcttttgaaagagcaaggccttctttttcgttgtagtcctcaaggtcttcgatgtagataattggttccggttggcggttggtagtgaatacgttttggtcgagtcctttgtacatgcgttgcagcatcgggtcgtggtcggcgttttcatcctttacgggaaaatactcctcgatgcgggtgataccttcgagtcccatgttttgggtgatttctactgcattcgtactccagggagtaatcatttcacggcgtggaccgacgaaacagcctttcaggttttcttcactttccgtcacggcttctccaaaaagccagcagagtttattactttcgtccggggtgagctgatgattgctctctacggcaatcacgctcttggaaggggttctgaaaaaaagaatcatgttgtatatttacgattttacgattttacgatttacgattgaagtttctacgggagaaactcttctctttttctgtggtgcaaagataagcaaattcgttggtggtgagaaataaaacggaaataaatatcttgtcggctttcctttttatgggccgacttatttttgcgttgcgatgaattaatatcggtttcttatggatttatttgttgtatacctaaaaactgttcctgatgttgcaaccatttattcgtctgacagctgtcagacgaataaattaatacctacgggctgctagttctctgtgtacaaagatttagcttttagggataaagggaataatttgcgctgtccgcgttttcgaagtcttattttaaatttctcctgcttcatgaattagggatgattcgttggaaaaaacgttaatatcctattctcatatcacaaaaaagtgcgatatttgcggaatgattcagatagagacaatattcgatatattagttaaaggctttattattggcgttgttgtgtccgcacctctcggtccggtgggcgtattatgcatccaaaggactttgaataaggggcgttggtacggatttgtgacaggcctgggagcctctttgagcgatatagcttacgctctgcttacgggttatggcatgagcttcgtttccgattatattaataaaggaagtttttatctgcaattgctcggcagcgttatgttgcttgttttcggaatttatacctttcgcagtaatccggtaaattctatccgtccggcttcgtccaataagggatcttattttcataattttataactgcatttttcgtcactctttctaaccctttaatcatattcctgttcatcggactttttgcccgttttgcctttgtacaacagggcgttttagtctttgaagagataacgggatattttgctatcgctgccggcgcattgacttggtggctcggaatcacttactttgtgaacaaggtacgtactaagttcaatctgcgtggcatttggatactgaatcgtgtcattggaagcattgtgatgttggtatctgtagctggattgatttatactttgttgggagagtcaatttattaggagataacattatgaatcaaatagctcaacaactgaaagagagaaacattgccgaatatcttatatatatgtggcaggaagaagacctcatccgtgccaatcattgtgaaccggaagaactggagactaatgtgattgtccgttatccggaggaccagcgtgctgccatgagagagtggtatggcaatctgataacgatgatgagtgaagaaggggtacgtgagaaaggacatttacagatcaataagaatgttattctcaacctgacggagttgcataatgctttatcttcttctcctaaattccctttttacagtgctgcctatttcaaggcattgccatttattgtagagctacggactaagaacgggaaaaaggaggaaccggaactggaaacgtgctttgaagcgttgtacggtgtgctcttactacgtttgcaaaagaagccgatcagtgaagggacggcgaaagcgatagaggctatcagtagttttctttctatgctggcaaactattatgataaagaccgtaaaggtgaattaaaacttgatgaataaatgagaattttagtaacgggtgccgacggtcagcttggcaacgaaatgcaagtacttgcaaaagagaatccacaacatacgtattatttcacagatgtgcaggaactggacatctgtgataaacaagctgtatgggcttatattgcggaaaagagaatagaattgattgtgaattgtgcagcttacacggcggtagataaagcggaagataacccggaactggcctataagttgaattgtgaagcggcgaaagagttggcaagtgctgcacaatttaatggtgcggcaatgatacaggtttctaccgattatgtgtttgacggcactgcccacattccttatacggaagattgtgacccttgtccggattctgtatatggcactactaagctggaaggagaatatgatgtgatgaattattgtgagaaagcggtagttatccgtacctcatggctctattccactttcggcaataatttcgtaaagacaatgattcgtttagggaaagaacgtgacagtctgggagtggttttcgaccagatcggaacgcccacttatgccaatgacctcgctcaagctatctataccattataaataaaggtatagttcgcggcatctatcatttcagcaatgaaggtgtttgctcatggtatgattttacggtggctatccatcgcttggcaggaattacttcatgtaaagtgaaacctctgcacacggcagaatatccggcgaaggcgaaccgtcctgcatattccgtactggataagacaaagataaaaacaacgttcggcatcgaaatccctcattgggaggaaagcctcaaaagatgcattgacaccttataatatatatggcagataatacagaaatacagagacggcgaacgttcgccattattgcgcatccggatgcgggtaagacatcattgacggaaaagctgctgcttttcggtggtcagattcaggtggcgggtgctgtaaaaagtaataagattaagaaaacggctacatccgactggatggagattgagaaacagcgtggtatctcggtgacgacttctgtaatggaatttgattatcgggattacaagattaacatccttgatactccgggtcaccaggactttgccgaagatacatatcgtacgctgactgcggtagatagcgttatcatcgtggtcgacggtgcgaaaggtgtggaaacccagacacggaaattgatggaagtgtgccgcatgagaaagactccggtaattattttcgttaataagatggaccgtgaaggtaaagatcctttcgacttgctggatgaactggaggaagaactgatgattcaggtacgtcctttgtcctggccgattgagcagggagtacgtttcaagggagtatacaatatatatgagcagaaattggacttgtatcaaccgtctaaacaaatggtgacggaaaaggtggaagtcgatatacatacggaggaactggatcagcagattggaaagccgttggcagacaaattgcgtggtgatctggaactgattgaaggcgtttatcccgaacttgatgtcgagtcttatttggcaggagattgcgcaccggtattcttcggttctgcactgaataactttggtgtgcaggaactgttaaactgctttgtggagattgctccgagccctcgtcctgtacaagcggaagaacgtgaagtaaaaccggacgaacctaagttcaccggatttatcttcaagattacagccaatatcgatccgaaccaccgttcatgtgttgctttctgtaagatttgttccggtaagtttgtgcgcaatgcaccttatcagcacgtccgccacgggaagacgatgcgcttttcgtcgcctactcagtttatggcacagcgtaaaacaacgattgatgaggcctatgccggcgatattatcggtttgccggataacggtactttcaagattggcgatacgctgacggaaggtgagatattgcatttccgtggtttacccagtttctcaccggagatgttcaagtacattgagaacgcagatccgatgaaacagaagcagttggcgaaaggtatcgaccagttgatggacgaaggtgtggcacagttgtttgtcaatcagttcaatggacgtaagattatcggtacggtgggacagttgcagtttgaggtaattcagtatcgtttgttgaacgagtataatgcatcttgtcgttgggagccggtaagtctgtataaggcttgctgggtggaaagtgatgatccggcagagttggaagctttcaagaaacgtaaatatcagtatatggcaaaggatagagagggacgcgatgtgttccttgccgactccggttatgtacttcaaatggctcaaatggattttaaacacataaaattccattttacaagtgaattttaatcgctgttttatagaatttaactaaaagaaagggtaaaaacgaaagaaacatatctcatataaatgagaggggagggaaatgaatacattattctggagtaagattcagcggggggatgaaggagcattccggcagctttatgagcaatatgcagatttgctgtatggatatggcatgaagatagccggtgatgatgatttggtcacagatgcgatacagacgttgttcgtatatatctttgaaaaaagagaaacctgtgctgtgcctcaatctatatctgcctatctgtgtgtgtcgttgagacatatcatagtcaatgaattgaagaaagagaatggtggtatattcagatcgttggacgatgtagatacgaatgaatataagtttgatctcgaaatcgacattgaaacggcgattatccgctctgaattagaaagagaacaattaaaagtcttgcagagagaaattaataacctgacgaagcaacagcgggaagtgttatatctgaagtattataagaagatgagttcagatgagattgcgcaggtaatgggattgacttcccgtaccgtatataacacgactcacacggcaatatccaggttaagagagcagttgagtaaaactttcctgcttgcggtgggagctaatttatggatttttaattgatgtgaggtatggaggataatacggaacttttagaaaaatatatcgaagaaggtaagcttcctctgaaaggcgagttgttttcccgtaaggcgaagattgctgagaagttgaggttgcatcgtgaagaaagtcgtcggattactgtaagccgccaacggaaacggggaggtgaaaggtcggcagccctgtattggggaatagtggctatgtttattgttcttttgggaataggtggttactatttctcagaggaaaaactagtaacggaaactacggcaatggattatgaactgccggatggcagtaaagtaaagctgatgggaaactcttctctgtcttataatcgcgtcacatggttttgggaacgtaaacttcaactattgggaaaagctttgtttaaagtgactcccggaaagacttttacggttcagaccgaagccggagacgtttcagtgctcggaaccaaattcctggtggtacaacaaggaaagaaaatgcttgtaaactgtgaagagggcagcgtgaaagttgcgacgccggtgggacaacggacattgactgcaggacagagtgttcggtgtgacgaaactaagatagtacctgtggaaagaaaggtaccaacaccggaagccgaatacccggaagttctgggctatgaagacgacccgctgattaatgtagtggcggatatcgaacaaatattcaaattgacagttatcgggcatgagaaatgtgaagggctgacttatagtggaacggttctgactagagacttgaatgcgacgttggaaaatgtcttcggttcttccggaatcggttatcaacttcgagagaaagaaattattttagaataaaaaagaggctgaattgaagtgcaccccaaaagttagacaaaaaacttttggggtgcattctttatgaaatacacttttgaaaaaaagctcaatatagtgagcagggtaaaagccggttgtccaattagacagttggcaaaagaaaacaacctacacgagaataaaattctcgattgggtacgtttatatgatagatacggggttgatatcctaagaaaacgttccaagataaagcctacaagtgattttaaggaacaggttgtacgcgagatattggaaaaaggattacctttgtcccatgcattgataaagtaccgtataagccgtacagcacttgaaggctgggttcgtacggttcgtaaacatggatatccggaattacatatatttagacgtaaaggcagaccttctcaaactatggcaagacctaagaaaaaagaacctcagacagaattggaaaagcttcaggcggaaaacttgcgcctgagggcagagaatgcgttactaaaaaaagtgaaggccttagtcgaggaacaggaagcccgggcacgtctcaatgggcagaagccatcgacgaactaaggtccgaatatcctcttgacttattattggagttaagaaagatggctcgttccgtattctattatcatctgaaacggcttgaggaaccagataaatacgcagtggagaaagaagaaatcaaatccattttccatgagcacaaaggacgttatggctatagacgtgtcacttgggagatgcggaaccgtggttatgtcatcaaccacaagaccgtgcagcgtctcatgacagaaatgcatatcaaatgcaagatgcgcaaggtgcgttatcgttcttataaaggagaagttggcagtctcgccccaaacataatcgggcgtaactttgttgctactgagccaaaccgtaaatgggcgactgatgtaacacagataaatataggggctacgaaactatatctgtcgcctattcttgatatgttgaatggtgagattatttcccataacatatctaacagccctaatcttgaacaaatatatgacatgctcgataaagcatttgataagtgtgataaccttgacggactcgtacttcattctgatcaaggttggcaataccaacacttcggatatcggaaaaggcttgaagggcatcatataattcaaagtatgtcgagaaagggaaattgtctggacaactctatgatggagaattttttcggaattatgaaatctgagcttctatacgctgaaaagttcgagtctccggaagacttcacaaaggctttggaagaatatatagattattataataataaaagaatcaagtcccggttaaaaggaaagagtccagtacaataccgaactctttctataactggataatgtttaaccagtccaaatttttggggtcacttcagaattcagcctcttttttatttaaatcgattttttttcgttttttcttggtaaaaatggagtaaagtcttctcttcctaatataagtactctatgaatagtaagattaagattagaaaagaatttgagttgctgtgagactaacatgaaaaaagtcaaaacaaacaatagattttggtagcagaatgagtaactaccaaaaatagtgagtcggaaatggttccctcgccggaagttatagttgttgaattagcttagttttccgactaaaaaggctgggttgaattttagaaggtttacaacccagtctgacactaatttttttagaaagccgatgaggccagaatgttgtatttatgttgtgaccggttttcttctggtagtttgataggttaagaaggtatgaaaccagaagtagggctaaaccgggttgttatcagtcagtgcatttatttaataattgttttatccaaggtgtgagagaagcaggagggagtttctctcataccatttgcttttatatgccgaggacattttgttgtcaatcctatcccaaacttgcggttttatactttattatccctttcttaattaattttataataaaaaaatggtattttcggacgctttttagacaaacggcttaaattactaatagtttattatatggaaaatatcgaaacagcgattctgctgatggtggtcggaatggctaccgtatttgttattctgctgattgtgatttatttaggtaaattgctgattactttagtcaacaagtatgctcccgaagaagtggctcctgccaaacaggaaacgccgagaggtcctgcgcctattccggggaatatcctggctgccattactgcggccgtgaatgttgtgacacaaggtaagggaaaggtcaccaaagtagaaaagttataattaatcaagtatatcattatcattgaaagacatgaaaagagaagtaaagtttagtttggtattccgagatatgtggcagtcagccggaaaatatgtacctcgtgtagaccaactcgtgaaggtagctcctgccattattgaaatgggctgttttgcccgtgtagaaactaatggcggaggttttgaacaggtaaatttattgtttggcgaaaacccgaatagagccgtgcgcgaatggacaaagccatttcacgaagcaggcattcaaacccatatgctcgaccgcgcactgaacggactccggatgagccccgttccggcggatgtccgcaaattgttctacaaagtgaagaaagcgcaaggtacagatatcacccgtacattctgcggattgaatgatgtacgcaacattgctccttccattacatacgccaaagaggcaggaatgatttcacaatgctcgctttgtatcactcattcgcccattcatactgtagagtactacaccaatatggcgttggaacttatcaaattgggggcggacgagatttgtatcaaagatatggcaggcatcggtcgccccgtttcattgggcaagattgtggcgaatatcaaagcggcacatcccgaaatacctgtacagtatcatagtcatgcaggtcccggatttaatatggcaagtattcttgaggtatgcgaagccggttgtgattatattgacgtaggtatggaaccactttcatggggtacaggccatgccgacctgctgagtgttcaggctatgctgaaggatgccggttatcaggtgccggaaatcaatatggaagcctatatgaaggtgcgtggcatgattcaagagtttatggacgatttcctcggattgtacatcagcccgaaaaaccgtctgatgaattctctgcttatcgctcccggacttcccggcggtatgatgggtagtttaatggcagacctcgaaacgaatctggaatctatcaacaaatataaggcaaaacacaatctgccgtttatgacgcaagaccagcttctgattaagttgttcgacgaagttgcctatgtatggcctcgtgtcggttatcctccgttggtgactccgttcagccagtatgtgaagaaccttgccatgatgaatgtgatggctatggagaaaggcaaagaccgttggggaatgattgccgatgatatttgggatatgattctggggaaagccggacgtttgccgggcaaacttgctcccgaaatcatcgaaaaggccgagcgcgaaggtcgcaaattcttcgaaggaaatccgcaggacaactatccggattctctcgacaagtaccgcaagttgatgaaagaaaataagtgggaagtgggcgaagatgacgaggaactcttcgagtacgccatgcatccggctcaatacgaagcttataagagtggaaaagcgaaagaggacttcttggaagacgttgcaaaacgccgtgcagagaaagataagtctcctgaagaagatgcaaaaccaaagacattgactgtacaggtagacggacaggcttaccgtgtgaccgtagcttatggcgatgccgaacttcctgctacacctgctgccgctgccgcaccggcaggagagggacaggatgttctttctccgcttgagggtaaattctttttagtgaagaatgcgcaggaaactgctatgaaagtaggtgacgtggtgaaagaaggtgatgtgctgtgctatgtggaagcaatgaaaacttataacgccattcgtgcagaatttggtggtacaattactgctatctgcgctaacccgggagacactgtttcagaagatgatgtattaatgaagataggataatgaacgagatatttgagaacttatatgagatgactgcgttcagcaatatcattgccgaaccgcagttcctgataatgtatgctatcgcgtttgtcctgctttatctgggtatcaagaaacagtacgaaccgttgttgcttgtccctatcgctttcggtgtgttgcttgccaactttcccggtggtgatatgggagtgattcaggcagacgagaatggcatggtaatgataaacggagtgatgaagaacatttgggaaatgcctttgcatgacattgcccatgaattgggactgatgaacttcatttattatatgttgattaaaaccggcttcttgcctccgattatctttatgggtgtcggtgcattaacggacttcgggccgatgttgcgtaatctgcgtctttctattttcggtgctgccgcacaactcggtatctttaccgtactgttggtatctatcttaatgggattcactccgaaagaagcagcttctctcggtatcatcggtggtgcggacggccctacggctatcttcacaacgatcaaactggctcctcatctgttgggcccgattgctattgccgcttattcttatatggcattggttccggtgattattccgttggtggtgaaacttctttgttctaagaaagagttgagtatcaatatgaaagagcaggagaagaaatatccttcaaagaccgaaattaagaatttgcgtgtattgaagataattttcccgattgtagtaactacggttgtagcgcttttcgtgccgagtgcagtacctttgattggtatgttgatgttcggtaacctggtgaaagagatcggaagtaatactttccgtttgttcgatgcagcttccaatagtatcatgaatgccgccactatcttcttaggattatcagtgggtgctacaatgactacagaagctttcctgaactggacaacaatcggtatcgttataggtggtttccttgcatttgccctttctattacaggtggtattttgtttgtgaaactggtgaatctcttctccaaaaagaagatcaatcctcttattggtgcaaccggattgagtgctgttccaatggcaagccgtgtggcgaatgagattgctttgaagtacgactccaagaatcacgtcttgcagtattgtatggcaagtaacatctccggagtaatcggttctgccgtggctgcgggtgtgttgatttccttccttgcataataaaagaacaaccggctttagagataagaatccggagatatgggcagagttatgctcgtatctccggatttacttttttgatttgctttctattgtttacaatactgttttcagactatttattcactgataacctttctatattcagctatcgccattttctccgacaaatatgcgttaattagatttgtgtgtgcctgtgtccacgataactgcgccgagagaacatccaccatacttgctttaccttcattataagagaaggtaactaaatcaagattttcattagccagattcatgttctctgttgcagttttcacctgatattccgtttccgtcagtttagttaatgcaccggacaattcttcgttgatattatccgttatataactttgttgcagtttctgtattccgatgtatgctttctgttggcggtttgttttgaaacgggctccccagcggaaaataggaatattcagattaatgccgacaataggattgaaagatacgtcatatccaaggttaggcgttcccgttgcccagccgccgctaaaatacatatttagttgagggttaaactggctgagagcggctttacgttgcgcttgacttttcatgatatttacttgcgtactttcgtaatcagcgcgccgttgcaatacattttccaacgacagaatctgtacgggggtaaaagctgtgtcaatcgaagaaagactgtctacgggagcattaggttccatacccatgaggatattcaacttttgcagtgctaacgtataattctgacgggccttgatatattgtagttcagcttcttttaagcgggtggaaatcatcagtaagtctgtacggctaatcattccatcgttaaaacggtcctgaatgatgttatattgctgtttgacgatgctttgatatttgtctgctgcctgtaacatagcttgtgaagcggaggcattccaataaacagcatcgctctgataatgaatctggtccaaagttagttcctcgttcagttgattcagcttctcatccgctttcgcaatcttatgttgagcgttaagggcaccacctgtatagagaggttgagagacgacaaacaccccttgataagtgtggttccgatattctcccagcggttcgttccatgcttttaggtcgctcatattcagagtaccgtccgcatttacgtctattttgggtaagaatcccgtatgagctatctttcgtgcttccgcacttgccattgtctttagtttttgttgtttcaatatctggctgtaagcctccactttgtcgcgataggcttcccggctgagataaggttgttgcgcccgggcagtgaagccgagaagcaacagtgatataattataaattgagttttcattttatccattataaatagtaaattcccatttaatccttaatccgttgaatggcacaataagccaccggcaacacaaacagtgtcagtatcgaagctaccagcaaacctcccatgatagtggctgccattccgccgaacatcgcatcgaacagcaacggcaacatacccagaatcgttgtccccgatgccattgctacaggaacgatacggctcgttgtggcactaaccaccgcatcaagcggcttctttcccatcttagcttccaaatcaatctgttccacaagtacgattgcattcttgatattcatgccgattaatccgagtaatccgaggatagagaaaaagtcgaatgatttgccaagtaatagcaatcctaacacgataccgatgaatatcaacggtaacatcagcaaaatcactgtcggtttacgatatgtcttgaataggaacagtagcgtaacaaacatcaaaaagaacgtcaacggaagattcttggctaatgcttcgttggattctacctggctttcctgctctccgaaatatttcatcgtatatccctccggaactttaatctccttttgtacctgcgaccacacttgattgaaggctgcaatcgcatttactccgcggcgcgggtcacattgcgccatcatcaccatttgtcggttgtaatctttcacattagagaaccggtattgaaaatcaaaatccgacactacttgttccaggcttgttgtctcgtttcccgtgccgaacaccggaagcgtgcgtaagtcattgatacggaacgaatccaccgtattatcctttagcagaatagggagcacctgatcgccctgacggtattctcccaacgtcattcccgttgtaccaatctggatactttgtgccattccctgtcgggatactcccaacggttgtgcacgttccggactatacacaggtttccataccggaatcttgttcccccacgaattgcggatattaatcaaatccggattccggtgcataatctccaacgcttggttggttagtgccacaagcgtatctgtattcggccctataaaaccgatctcaatagcagcgtctacggcaggggataatttgaacaggctcgtccgggtaatcgcattcggataattcgctttcatatatccgtcgaaattctcctcatattccttcgtatatttactgtccgtcagttctaccagtacattggcgaagttcggtttcggtcctactgaagtagatgccagataatatctcaatggtgtgcttccgaaagtaattgatactttctttacttccggctgttgtaccaaatgttcttccaccgatttcatctctttcaccacatcgttgatactatacccgtccgggtagaatacgtctgcacggaaataaggtttgtccaaagaagggaaaaagttttgtggcatcgtccccatgatgacgagtgagatgatgaaaagtgctaccatagaacccagcgtcaacaccttgcggcggatcagcgtccggagaatagaagcaaacttatgatagaaaggcttgtcatatgggtcttttgcatcgccgttcgccttggctttcaggataaaattaccgaatacggtcgtctgtgtcaatgcaagtatccaactcaatcccagcgaaatggcgagtaccacaaacaacggcttcacgatttccgctaccgaagacggggccagataaagtggcaggaatgaacagatagcaatgaaagtggctccgagtaatccccattgcggtcctgtggcaccgtctatcaatgcctttcgcctgtttactccacgagcaatggcaatctgtgcattatccgtcaccacaatggcattgtctaccagcatacccattgcgataatgaatcccgccagcgacgtacgattcagtccgacaccaaagaaagacatgataagtagtgtacctccgatagaaaatatcagcgatgagccaatcaggacaccggcacgaagtcccattaccagcatgataatcacaattacaattaagatggactcaatcagattgatgataaatccgttattggcttcgttggctatttcgttttccagataaagactttgcaattccagtcctacgggcataagcgggagtagttcactcagtttggcttttacgttttcacctgtctgcactacgtcccgttgcgggtcggtagagacaccgataccgatagcacgttttccgtttacgtgcatgatattggaaggaggatcgagatagcccttttcgataacggcaatatctcccaacttcacctgtcccgctttcgtggtgataacctgattgcggatatcatctatggtcgtatacataccattagcagttacccgtagctgttgttcccctgcgcggatttctccggtgttgataatctggttttgtgattgcagcaggctggcgagctgtttcgggtcgatgcccatgcctaccagtttattggtcgagatgaagatatttactacctctgtctgtactccgaacagtgccactttcatcacaccgtcggcagtgacgacttgtgttttaatccgttccgcccagtttcgcatctcgtcgtaggagaaaccatcatcggccgtcagaccgtaatagataccgaatacatcgccgaaatcgtccgacacagtcggcgtagatgcaccactcggcaactgcggttgtatattgagtaccttcctacgtagctcgtcccacttttgcggaatggaacttgccgatagtgacggttgcaattcaaatgtgattttggaaagcccgtacatagattccgatttaatcttgtacacaccactcatactttgtatctcgcgagagataggctctgttatcagacgttccacttctgccggctcggctcccggataacgggtcatgataaccgctgacttgatgacgaagggagcatcttctttcttccctagctttccgaaggaagaaatccctccgataagcaacacagcaagaaagaaatagataatcttcgtgttgtctaatgaatatttggctaagttcatttctctatatcttttacgttttccccttctactaactgatatactccggcaataacaattttctcttccggtttcaaccctttggagataagtacctgtgcttctccggtaggtgcgttaacagtcacttctcgtttgtgtaccttgttgtcttccaccacccagacgtacatcttctttccttcgctttcaccgaacacggcgcttaacgggataattgtccaactatcctgtaccaacggtcctacatctgccgtgaaacggatactgcacgtaaatcccggtttcactgcatataaatcccggtcgaaagacgggtcatcaatagtaatactgaccggaatccccgttccgtctgtcgagatatcaagatattcttcaagctttgcctggaaaacatgtcctttgaatgtgtcgaactctactagaaaacgcgggtctttggtgcggagcaggtaaaggtaagcgtcgggaattgtaaacttgatgcgcagattgtgtgtattgaccaactgcacgataccttcacccgagttgacacgctgataattttccacaagacgtttttcgatggaaccatcgaagggagccgtcaatttagtgtcgcgcatattattgacggataactcatattctgatttcgctttctggtaattagccaggctgatttcatattcctgaaccgatatggcttggcgggagaggaggcgcttattgcgttccacttgtgcggcagccgtctcatacgccgatttggtagcggcatattgcagggcgatgtccctggggtcgatagctgcaatcaattgtcccttctttactttctcgccttctatgacaggcaggttgatgatttgtccgctgacccggaatgccagcttcacatactccacggcttctacaatacccgaaaaatcttttctgatgatcgatcttgactctacaatcgtggttttcaccggacgggccgttataacactcgtttcttttttttgtccgcagcccgctaataggacggctactgcgagcataaatccatatttctttttcatacagcacactgatgtttagagtttttgcgttgattcgtttctcttttttaaagagagtaaacaacttacaagtgtttatgttcaggatttgtgtgcttttcgttgattgtcgctacgagttggattcttaatttgttttattggggagtgcggtaaaatagaggctctgtttgaggaaaatagagtgtctgtttgtggcagttggagcgtctgtttacatcaaacagagcctctgttttggggagagttcatgtgttctctagagacaggctgaaaggggtggggttgatatgaaaatagtatttttatttccgtcttcttgtcggttttcctgagaagatagtcaattcaaaaatcgtaaatatgatttctgttgttgtatatccgtcgagagtgtattccaaattctcatcttcggagaaatacttgaggtaaacggttggcacacccatataaaagtcaagaaaaagataagaagtatagttataaatgcccaagtcggcaaatttatttaaaatgtcattgttaaaaacagtacaccatcctgtttgggtttcgaatcccgacatttcgaatctgcgatgctctttcataaatttgtctttgtccacatgccttaattgttgctgcaattcgtcaccaaaagaaaggcgttgtctgataaggttaaaaacttcctcctttgtcatttgttttaagttagttatttccatttttgtttattaattctgtaaaggtacttcctttattttgtaataaacggaatccggacatttttcttttatttatttttcggctgatagtcctgaaaacttctggatatattgttgccagtgtaatgtctcaaaacgaaaaagaggaaattcctttcggaatctcctctttttcatcttacaagaaagactaattatttcttcttacggtcaccgtaacggctcatgaacttatcaacacgtcctgcagtgtctaccaatgtagatttaccagtatagaacgggtgagaagtgtttgagatttcaatcttcagcaacggataagtttcaccttcgaattcgatggtttctttagttgctacagttgatttagataaaaacatgtcaccatttgacatatctttaaatactaccggacggtatgattctggatgaaggccttttttcatttcagtatctgtttttttaatttatattctgttactattttggtaagaaatagtgtaatggtcattttcagagcgcaaagataatgcttttatatgaaatagaaaaagaattcttttaaaatttataatatatagcttcgaattactgatttactgtgtattgtttgggggcactgaacttgttctgatgctatgacgataaattaaactgattgctagctcgacattacaatataatgtcattgtgtcttcctgctaaaaaaatacggttctatttaaacctttttctgctatattttcctttccgatgttcgttattcgggggataatgcttacttttgcgtagaatttttattcactaacaataaactttaaacaaaatggtaaattacaaagatttaggattggtaaacacaaaagaaatgtttgctaaggctatcaaaggtggatatgctatcccagcattcaacttcaacaatatggaacagatgcaggctatcatcaaggctgctgttgaaactaaatctcctgtgattcttcaggtttctaaaggtgctcgtcagtatgctaacgctactttgttgcgttacatggctcagggtgctgtagaatatgctaaagaattaggctgtgcacatcccgaaatcgttcttcatcttgaccacggagatacttttgaaacttgtaaatcttgcatcgactcaggtttttcttcagtgatgattgacggttctcatcttccttacgaagaaaacgtagcactgactaagaaggtagttgattacgctcaccagtttgatgtaactgtagaaggcgaacttggcgtattggcaggtgttgaagacgaagtttcttctgatcaccacacatatactgaccctgaagaagtaattgatttcgctactcgcactggttgcgactctttggctatctcaatcggtacttctcatggtgcttacaaatttactccggaacagtgtcacatcgatccggctactggtcgtatggttcctcctccgttggctttcgaagtattggatgctgttatggaaaaacttccgggattccctatcgttcttcacggttcatcttcagttcctgaagaagaagttgaaacgatcaacaaatacggtggtgctttgaaagctgctattggtatccctgaagaagaattgcgtaaggctgctaagtctgcagtttgcaaaatcaacatcgactcagactctcgtctggctatgactgctgctatccgcaagacttttgctgaaaaaccggcagaatttgacccacgtaagtatcttggtccggctcgcgacaacatggaaaaactgtataagcacaaaatccttaacgtgctcggttctgacaacaagttggcacagtaatcttcggattatttcataaataaaaagaaaggctgcttccggttgacggtggcagcctttttagttagtggtaaaacgctgattttattctttctttgtagtctcaggatttccattctgaaagaaatcctctattttctgtttgcttttcaggtctttcagccagttgtcagcagcgttataataattggttattcctaaaacgagttctcccttttcattcagtttcgcctgttctgctttctcatctttgggacgtgtttttagaaatgcttccaggtagcgttctgtgctttttctgtcttttaaggcgaaaaaggaaaggtgtgccatgtcatatagtaatttatgattttgtctgtcgtatttctgataccgttcttttatagacgctaattgttctttatacatttgcgccattttataacagtcagtcatgcctatataaaggcgtaccatgctgctgtctttcggtattgacaaattgatagcttgttccagatactctactccttgtttcttccatgaagtcttggcacaggaacgtccgaggtaatagagaaggtttacattctccggatcatatttccgggcagcttccagaaaatcatgtgcttcataatatctttcaatggcataataactgataccgagatagtaacaggtatggaaggtactgtctccctggtttaccaggtactgataacggcggattgcagttggataatcctgttttagacagtacgccaaagcattctggcgattgacggcaatgttggtggtatcaatcttccggtatttctctgttgcttctattgcttcgtcatagtaagaggctgctatattgattgcccctaatttggcggcggcaagatagtcggcgggatatttttcctgaatattgtagtagcaacccgcggcaggcagaagttcattcataccttcgaaactctgtgcttgcaaatgcagggcgatagcagaactgtctttttctgtcattaggctgctttcacccaatgcttcgcggaacttttgttgggcgagaagcaggttgatatactgtatgcgtacatatttattctccggagtgaggtcgagcactttttcataatatgctgatgcttgcttatatttggcaagggtgcggcaacattcggcggcctcaatcagtgcgcgagtgttagtgctatccttgcctatgatttcctgataggtggaaagtgcttccgcgttcagtccaaggctacgcagggctttgcctttctgtagcaataggggagtggcgggctttttttgtgcaatgagcgagagtgccgtttcgtagtcgtaacttgccatagcctcttggatagggtcagtctgctgtgccattaatagggtggtggaacagagcaggagtagtagaagtatccgtttcataaattgtaattttagtgtgtcgtttataaagcgcaagttactaaaattattgtacttacgaaatattcgtaatgtgtttcagatagattaacgtatcgataacacaggataacataacagagaatatgacataaagaaaagaagaacaataaaaaatgcccctttccgcagaaagaggcattttcgtagagaagaattctacttttatagtttaagacatgccgaatggaaatccggcagggcatcttatctctacattaagaatcctaacaggataccggcggcaacagccgaaccgattacacctgctacgttcggacccatagcgtgcattaacaggtaattggtcggatcgtattccaaaccgataacttgtgagatacgtgctgagtcgggaacagcagatacacctgcattaccgatcaacggattaatcttgttgtccttcttcaagaagaggttgaagagcttaacgaacagtacgccggatgcagttgcaatgatgaatgacaaagcaccgagggcgaaaatcttgatagagtcgaaagtgaggaactcggacgcttgcgtagaagcacctactgtaagacctaataggatagtaatcgtatcaatcagcggaccgctggcagtgtttgccaaacggcgtgttacaccactttctttcaacaagttaccgaagaacagcatacccaacaaaggcaaaccggaaggaaccaggaagcaagtcagtaacaaaccgataatcgggaatatcactttctctgtgtgagaaacagcacgcggcggtttcatgcggattacacgttcgtgttttgtggtgagcagacgcatgataggcggctgtatcaccgggaccaacgccatataggaataggcagacaccgcaatagctcccattaagttaggggccagtttggatgaaaggaagatagccgtcggaccgtctgcaccaccgatgataccgatagcaccggcctgcatcgggtcaaatcccatttccaatgcaatcatgtaagcaccgaagataccaaattgtgcggctgcaccgattagcatcagcttcgggttagagataagtgcagagaagtcggtcatggcgccgatacccaaaaagatgagcggcggataccagccggacgtcactccctgatacaatatgttcaatactgaaccttcttcatagatgccgactttcagtcccgcatccatgttgaaaggtatattaccgatcagaataccgaatccgataggaatcagcagcattggctcgaattctttggctatagccagataaataaagaacaggccaataaggagcataacgacgtgtcctcctgttgcgttggcaaatcctgtatacgtccagaaatcggcaaggttgtttcctaaaaagtttataaaatctcccatattattcaataattacgaggtcattaccttcaaggacagaatctcccttgtttacgttgatagcggtaatcttaccgtctttgtctgcattgatattgttttccattttcatggcttccaatataataatggtttgtcctttcttcactgtgtcgcctacgttcacttttatgtcgagtataacacccggtagcggagatttgacacctgattttccggtagactgtgcagccggtttcactaccggtgtggtaggagcagccggagagttcggcaatgggcgtactaccggttttgcaggtgccgccttcggctgtttttccatttctactttatagtgcgtaccgttcacttctacatgagcgatattgtcttcgatatctccaatggtcactttatatgagttaccgttgattttgtatttatattctttcatcgttttatctttttaagggttgacttactttttgggagtttcacgcaaggtgtaaatcttcgaactccacggtgaatagctacgtttcacacgagtgatagtcagtaccgtttcttctacgtcgtgtacctcatcttgcatttcgtgcaatgccatagaaattgcggcataaacttcgcccggagcttgtgacagttctttggctgtttccttgtcgataccttttgacttcatcgtattgcgtttgctcaagttcacggctactttacctacaatcttgaaagagatataaagaagtatcaatccgcagaataccacactcatcgccgagatagacataccgatacctacagagtcatgttcttcgaacttctccattttagcattgctgtcgagcgtcttgttattcgtacttggagtcacatatttgtcactacttccaccttttacttcccaatttgccgctccgtcacttatacgtgcgtatgattggttaggacccagaactcctgccggtactacaatctgatcaagtagcttcttgccggaatcgaataagccaatccagttggcagtctcagggttcaatttgcaacttgtgtgaaaggtaccacggttaggttcaccatccgcccagaatagagcatgctggcggggtttaactaacgttagtacatcacctttagggataaaataggtaactgtatcacccggctgattgcttactttcagtaaacatcccgccaagtctgcgctaccgtatgatttgttgaatacttcgatccatgcgctgtgcagtccgtaatcatcctgaaaattactttgattgtctatcaggacttcgttcagcattagcttactgtttgtctttttctctccgcaagaggtcagtccaaccagtaacagcaaagaaaggaatattccaattttggttttgctcataatctttcttgttttaatgtgaaaagttggattacaatggaatattgccatgcttcttagccgggttagtcagcttcttagtctgcagctgctgtaaagcgcggataacgcggaaacgtgtgttacgcggttcaatcacatcgtcaatgtacccgtatttcgctgcgttataaggattggcaaacagtttcgtgtattctgcttctttttctgcaaggaactgagccgggttttcctgttcttttgcttcgcgtgcgtacaacacttctactgcacctgcaccacccattactgcaatttcggctgtcggccatgcgtagttcatatcaccacggagttgcttacagctcatcacgatgtgagagccaccgtaagacttacgcagagtgatagttaccttaggtacagtagcttcaccataagcatacagcaatttggcgccatggaggataacgccgttatactcctgacctgttcccggaaggaatcccggtacgtctaccaatgatacgataggaatattgaaggcatcacagaaacgtacgaaacgtgcgcccttgcgggaagcgttactatctagtacacctgccaggaacttcggctggttggctacgatacctacggactgaccgttgaaacgtgcgaaaccgataatgatgttctttgcatagtccttttggatttcgaggaattcgccgccgtctacgatcgcaccgattacttcgtacatatcgtatggtttgttggggctgtcggggataatatcgttcaaagaatcttccagacggtcgattggatctgcacaatccacataaggagcttcttcaagattattttgaggaatatagctcaatagcttgcgaatcagcgccagaccttcttcttctgtctgagcggtgaagtgagtcacacccgatttagtagagtgtacgcttgcgccgccgaggttttcctggcttacatcttcacctgtaacggttttcacaactttcggtccggtgaggaacatataagaagtaccttccatcatcagcgtgaagtctgtcagagccggagaataaacggcaccaccggcacaagggccaaagatacctgatatctgcgggatcacaccggatgcaagaatattgcgttggaagatttctgcgtaacctgccaaagcgttgattccctcttggatacgtgcaccacccgagtcattgataccgatacatggagcacccattttcatagcttgatccatgattttacaaattttctgtgacatggtttccgacaacgaaccggcggaaacagtgaagtcctgagcgaatacatacaccagacgtccgtcgatcgtaccgcaaccggtcactacaccgtcacccggatagtgtttcttttccatgccgaagttcgtgcatctgtgctcaacgaacatgtccatttcttcgaaactaccttcatccagcaacatagccagacgctcgcgcgctgtgtatttccctttttcgtgttgcttcgcaattgctttttcaccgcctccgatacgtgctacggcacggcgttcaataagctctttaattttttcaagttgattactcatgagttcttgttggttttagagtttatagattaatgttcgcagagttctgtcaacacacccagagttgattttgggtgaaggaaagcgatgttcaaaccttcggcacctttgcgcggagctttgtcgattaggcggatttccttgctttctgcttctgccaaggcattggctacaccatcttccacggcaaatgcaacgtgatgaacacctgcacctttgttctcaatgaacttagcaatagtgctctcggggcaagtgggctccaacagttcgattttggtttcgcctactttcaagaaagcagttcttactttctggtcttctactgtttcaatgttgtaacacttcagacctaatacattttcgtagtaaggaagggcttcttcaatgctttttacagcaatgcccagatgttcaatgtgtgaaatcttcataactatacttttttatttggttttaattatgtgcttatacggcataaaacagcacaaagaaagacaattcttacctaataaagaaatttttcagcatttaattattgggatataaagtataaaaaatggtagggagggagcatgaagaatggttttgtaatctggagattgcatttaaacgtaaaatttgaccattaacttattcagccaaggccaactgacgcggaaccaacgtcgggtactgctttgttttcctccgaagcggagtacgaaatcgcgataaccatgccgacggaaaggaagtcccacatccatgaactccagatggcggaaacctcgttcgtgagcatcctccagagctttccaaacggcgagtacgcccgggtattgcagtgcatacgtctttctcattcctcccgaaaaccagaggaaagcattgtctcctgagtaaatgcatacagagccgccgataatcttttctttgtagcggacaataaatattttagcttgctttcccttgatgagcatattgttcatgtggcggaaaaagtcattggcagggaaataccggcgtatgcgggaagagtaaaccttatgcagcatacgtgaaaaatcacgtatctcgtctgtggtgtgcgcttcttctactttggctccatttttaagccctttttttatctggcggagacgtgacgggctgaaacggtcttccgcttttttcgaactatgtaacgaattgcgtacccgtaaccagttgaccggaaaatagtcgttgttccggaaagaacggtaaccgaacatagagttgtccagattgcggaattcgataaggatacaggtacgggatgcctcttgcgtgagatgttccaacatttcgccgaacacttcttcctctctttccctgatgttcggaagcgaatctttctgttcggctgtaaatgtcttttccaggaattcaccttctccatataccacacattgtttcacaagacaggaaggaagccattttttagttttgcggatcgctgccaagagccgtgccacaggttttccgtcttctgttgccactatcagtaagggcgagtaaccgggcgttgcttcgtatatttgaaacaactccttggaatggaatgtgttatttcccggcaggtcaggaatatcctttccgtggtaatatgtagttagtttaagtggcatgtgggacaaatttacactttttatttttcattcaacaaaaaaacggagattttgttggcgacctttaaaacgaacagtctatttttcttgcgtaatatttctattttttatctgattttcgttacttttgcgtattggcaaacactttaaaagaagcaatttatgttagaagaaatattggcttacaacaaaaaattcgtagaggacaagggatatgaagcgtatattacaaataagtatcctgataagaagattgctattctttcctgtatggacactcgtttgacagctttactgcctgctgcgctgggaattaaaaacggcgatgtgaaaatgataaaaaatgcgggaggcgtcatttcccatcctttcggtagtgtgattcgtagtctgctcgtggctatttttgagttgggagtggaggaaattatggtgattgcgcactccgactgcggcgcttgccatatgcatagcgaagaaatgttggagaagatgaaggcaaggggcattaatcctgattatatcgacatgatgcgtttttgcggggtcgactttcattcatggctggacggcttcgaagatacagagaagtcggtaagaggaacggttgattttattgtgcagcatcctttgattccggtggatgtgaaggtatacggattcattattgattctacaaccggagaattgacgcggattgtgtgaaaaggacaaaaaaataaggcaactctttgtcagttgcctttatctttttacggttatatactttctttgactggtgcacccttttgtgacaaatagggtgtccgtacatctcaatttccgcctcacggcttgctttacgattcgctttaatgtaatcgtcctgtgtaattcgctttttcatgatgatattgtttatcgttgcaaagatactgtttttatttcctattacgctcggtttgcactatctttgcatacattaattaaatgaaaccggaaataatatggaaaatttcagtgaattgataaagaatcgtcgcagtatgcgcaagttcaccgatgaagaactgacacaggatgaggttgtaacattgatgaaagcagctttgatgtcaccttcttccaagcgcagcaatagctggcagtttgtagtgattgatgataaggaaatgctgaaagaattgtctcattgcaaggaacaggcttcttcttttattgcagatgcggctttggctattgtggtaatggctgacccgttggcaagcgatgtatggattgaagatgctgctattgcttctattatgatacagttgcaggcggaagacctcgggttgggcagttgctgggtgcaggtacgtgagcgtttcacggcaaccggaatgccttccgacgagtttgtgcatggaattcttgatatacctttgcagcttcaggtactttctgtcattgcggtcggccataaggggatggaacgcaaacctttcaatgaagaacatctccaatgggagaaaatccatatcaataagttcggaggaaaataacaatgggagctgccaaagcaaataatagtaaagatacttatctcgcgactgccgttacctttatggtgatcggtgcactttttctgattgataaactgattcatttttcttctatcggtttgccctgggtgatgaataaggataatatgttgctgtatgctgctgcctgtttccttattttcaaacgcgataaatcaataggtcttgtgttgctgggactttggctggtgatgaatatcggtttggtgatgtcattgcttggttcattgtccggttatttgttgccattgacattgcttatcatcggtataatcttatattggtttgcaaaacgctgaaaaaacgatgaaaagaagtatagaagataccccggttgtatttatcggtgccggaaacctggctaccaatttggcaaaagcactttactacaaaggttttcgcattgtgcaagtatatagccggacagaagagtccgcccgtgcgctggcggagaaagtagaggcggattatacgactgacttacaggaaatatcaaaagacgccaaactctatatcgtatccctgaaagatgcggcttttgtagaattattgccgcagataacggaagataaacaaaaatctttactggttcatacggcggggagcatccctatgagtgtctgggaaggtcatgcagaacgttatggagtattttatccgatgcagacattcagtaaacagcgtgaagttgactttcaggaagtgcctttctttattgaagcgaaaagggcggaggatacggaactattgaaagcgattgcctcgaccctctctgagaaagtgtacgaagctgattcagaacaacgcaaaagtcttcatttggcagccgtctttatctgtaatttcacaaatcacatgtatgcgctggctgccgatttgctcgaaaaatataatttacctttcgaagtgatgcttccgttgattgatgagactgcacgtaaagtacacgaactggctccgcgtgatgcgcagactggaccggctgtacgctacgatgaaaatgtgatgagtaatcatcttgcgatgttggtggactctccggcgttgcaggaaatttataaattaatgagtaagagtatccatgagcaccataaattatgatttatcacgcatcaaggcactggcttttgatgtggacggtgtgttgagttcgacaaccgtaccgttgcatccttccggggaaccgatgcgtactgtgaatatcaaggacggatatgccattcaattggcagtgaaaaaggggatccgtattgctatcattaccggtgggcggacggaggccgtccgtatccgttttgtcggactgggcgtgacggacttatacatgggttctgcggtgaaaatacacgactatcgtgctttccgtgataagtatggacttgctgatgatgaaatcctgtatatgggggatgatgtgcccgatatagaagtaatgcgtgaatgtggcttgccttgttgtccgaaagatgccgtaccggaagtaaaagcggtggcgaaatacatttcttatgcggagggggggcatggctgcggacgcgatgtagtggagcaagtcctgaaagctcatggaatatggttgacggatgatgccttcggctggtaagagaactgtcaattgtaaatcattcaattttttaatcgtaactaaaatcatgcttagcaatttaaagaaatatcagcttatattggcttccaattctccccgtcggaaagaattaatgtctgggttgggagtggaatatgtcgtcaggacattgcctgacgtggatgaatcatatcctgaaactttggtgggagctgcaattcccgaatatatatcgcgtgaaaaagcggatgcttatcgttctatgatgaagcccggcgagttattgattacggccgataccattgtatggctggaggggaaagtgctcggtaagccggaaggtagggaaggagcggtggaaatgctgcgtgctctttccgggaagtcgcatcaggttttcacaggtgtctgtctaacgacaaccgaatggcagaaaagcttcacggcagcttccgatgtgctgtttgatgtactgtccgaagacgaaatccagtactatgttgaccgttatcagccaatggataaggcaggagcctatggtgttcaggaatggatcggatatattggagtgaagtctatttccggtagcttctataatataatgggactccccatacagaagttgtatggggagttgaaaaagttataataaatccagcattaacggaatatcctcttctcgaataccttgtttgagaaggggttcttcgtctttatgaaacatttcgaggaatctttctcgcgttccacaggctgtaattgcctttccatagagaacagccgctttctgaatatttcccattacccaggcaacatgtcctgcattcatataatcaatagctaacggtttatgctcgatgatcttttcataatacttcatcgcctgctcatacttcaagctgatgaatgaacaccagccgataccgcgccatgctttcacacagttactctcgataaaatccagtttgaagaaatagttcagtgcttcttcatactgcccgagttcggccaggcaactaccgatatagaaaactgcagttgaagcttcgggggtagcttcttccacctttttataataagcaagggctgcctcataattccggttcagccggtagcaggtagccaggtgacggttattccatatattatccggtttcagcgtatcagcttttagataggcttcgatagcttccgcatatctttttcttttttgcagagcatatccgaatttttggtaatattctgcaccttctccctcaaatcctccgatttcaatcaattctttataaatgtcgatagcctcatcccaacgttcctttgaaagataaaaatcagcaataggaaacaattcttcttcacaatatagtagattgtcgagtgcgggaacatgatgaaggtcgagtttttctttgaaaatatcacgaaattcattccggcgcacactaagtttgaagaaacggtacaggtcgtgcaggtattgattgctcgctgttcccgggcgtgcgttgaatttcttcatagtttcggcgttcgacttttccgccagttctgctacctgctgttcgttgagttggctcaacatcatttcctgttgcattttaggcagttggtgaatggtgaaaaagagcgaatatttatcgctattactgaaaaagcccgattggagaattaagtcaagcaaactgcttccttcgttccctacttgtttcagtgccttgagtacattggactgttgcttgctgaacggataaaaccagttctgtacctcacgaaaaaacggataacttttcagagaagaaaaagtgctcatatacacatcggctccttccagctggagttcgttcatttcgcgcagcttgtctcccagtccggattgttcgaaggcatcttcccagtccgggttcttgtcatcgttttcttcatcgttttcctcaaaaccgaatctaatgttcttcatggaagaaacatttttcagcatctcgggaataatctcttccctcatcttcttatcaatcttctccgtttcctgacataacagcatttggcggtagatacgggcaacatcttcccggaaagaaggaatttcgtccataaggtcgaccctcttgataagttctgggtaataaagaagccgggttctgtgaatgtagaagatgaatatgacaccaaccaatgcccgttggctgacattgacatctttatgacggtaagcatccagtagccacatgattttacgtaagtcaaaacattccattacgctcagtgtgacagcactgacaaataaacataagtcgtcgggtaaaagcaattccgaacccaacatggattttgcgtcttcttcgtcttcagaagtccacgaactgtttgtccatgttcttacaaacatgaatttaagagtgttctcatgccgttgcagcacttcatccattttagcatcggagagtaatccgctgattgctaagtcatcattaaaagattcaagtatatgaagtattttttttaggccatattctgccaaatctgccggttcgggtgtacgacgtacttcgtgataatattttgatgaagcgttgtccagcatgagtaggcgtgactggtcggcaatactccatgtgtccgccaccaacttttggtataggttccaccgctcgggatcgttggctccctgtttcatgtattccaacatatacttgtaagaagtctgcaattgttctagacgggtacgtaaatcccagtcgggacattgccaaagcaacgattccagctgcatcaaggcctccttgagtcttttttcttcaagtaaggtacgtatatatgcgtattgttcattaatcgttttctcgttcatcataattcaattatttgttttttccaatccaggtcaggcgtttccataaaccttcgaagggaccatgtttatggtgacggagccaccacgaacaaaataccatttgtaatataacaaaaagaatgccaaaaaagaaactataagtgattcctaaatagcgtcccagttcgaatccccaatgatagaacaaaagagaaccgaaaattgattgccccaaatagttagttaaactcattttaccataagatgtgaaacgcatgaaaaagctgcggtcttttacgtgatagaaggtgagcagcaatcctgttaccaataacaccataaaactaagactgctgaatgagcttagtatgagctgtaagggtacgaggatagcacttctctcgataaattccggtaacatattgttgagcccgtagatagggaagaagcagagtagggcgatagccagtgctttcagccacaggcgctcgttctgttcgctgtataggaaatatttccggcgtccgataagcataccgaacaggaataatcccggagtttgcaggatgcgtccgtgttccaatgcccaagtcatgttggcaagttgtccttcccacatattcatgcggatggtttcgaggaaggttccgttcttctgtacatcgaaagctatgccgaaataataacgtgccagactttcacctgccacatagtcaggattacataaagcatagattaattttgcccagtcgataggttgcaggatcagcagggtggcaaagatgacgacgatacggtcgctcatgcggcagaatatcggaagaataataccgaggatagcatacatggttaatatttctccggtaaagaaagcagcattgaactgtccgatgataaaaaggataaatagcctccataggaaacggagccggaagtcctttcctttgcgttgttgattattatcctgaatataaaaactaaagccgaaaagtagggcgaatactgcatacgccttattactgaacgtgaagaataatcccctccaaatagcttggtcggtaaagttcatccattcaaaaggtactttctccggaaaagaataaaaattgaagtgttcaatactgtgtaaaaggatgattcccattacggcaagtcctcttagtacgtcggccacgtctactcgggcgttgggttcggcgattttgtgttccatgatttccagtctttcttttataggtttattatatgatgattctccataatacttgcaacttaaaatctgacctgtacctgtgcctgtatcaggttagaatctttctgtccgtttccttttttgtcacaaaaagtgtattgtgcctgcaagcggcatctggggtagaaccagtattgcacaccggcaatgtagttgttttgtttgaaatctgccgctttattaggattaaaataatcaaacgaagcgataaagtcgaggtttcgtgcgaaacacacacttcctgttgcatagaatccttcactttttacgttccggtccttgccgccgagatattcggtacgcagattgaaacgggaagtggtaacaacccctcctgcgctccaacgctttttggcatagttctctcccgttttgattccggtatattcggaatcggctattgcgtgtccggttccccggataaacgatccgcccacggatagccattccaagggataaatcataagattcccgacaacatctttctggctgttcttatcctttgtatttagcccttgtccgttcatcacggcaactttatattgtaggaagtcgtggaatagtttaccatgaatcatcatgccgatgtctctacccgaagtcatgccgtaacatttgtcactgccgctgacgcctgccagataacagacggattgggaataacagttgattagctctaccgtagtaggagataattcattttcaatcgtataaggaactttaaattctccgatacgtgcggtaagtccgggaagaaactgataatctgtgtacacttcgagcagcataccaccgttgtaaaagtcgtacataaaatcacaagtccagcgtttggtgatttttccgtgtgccatgaaaataattcgtttgatatcgaatgtattgtccggtttggctgcatcatcgtacgtatatcccaactgggcatatccggccaggctgatacgttctttcagtgtgttgacaacttggttcagtgatgttttttcttgtgcaataagggacttttgtatacccggcatgcttgatagcaagataattgaaagtaagagtgtttttcgcatgggattaatttagttgttattgaatggtggttgatactgtgtgaatataagttgtgtctatcagattgctttccgagtacgtttggggtatccggtgatttgctttcagccactgggttgctttttctatggcttctgccgaaggtcgtgttgctttccgataggtagggagggcgatcagtccggttagattctctggtacaccgatttccattaatacttgtttccactctgattgcggatgcatttttatatggtttactcccaagttataccccgtaatgagcagttcgatttcttttcgtttctcttggagagcttttcgggaaaaagcggtggcgataaattcaattcccagttcctgcgtacttattaatgatttgttcttgctgttcatggcgatagaagcggcagggtcaggcaagaaagaagcatcaatctggttatactgtaacatttgcaggcggaggggaagttgactgatttccggtttgtttgtctctgcatacttgattcccgctttgtttaatagttggtcggtcgcatattcgacaacggtattgcgggatacggctatatttttctctataagttgttccggttggttgatacggctttctttagagacgataaagcagagatagccgtcattcttaaagataaagcccaactccgtatgatgaatagcttgtagtgttatcgcactggggtaatcagttaccataccatccatttgtccggtttggaaaacggcgtcacggtcgttggcagaattgaatgggagaatagttaagtccaatcctaatgagtcataaataccttcggagcgggcaatgtaaaaaggtaacccttcgagtgtaggcatcatacccaatgtgagtggtttcagttcggatagaggcaaaaaaagactatctccttttttactctgacaggagcaaaggaagaaaaggatgaaacaaaagagtagtatcggtcttttcatacctcatttttatgaatgagggcaactcttttcacaaagaactgccctcttatttaaccattgtaaaaaaattagctattataaattttcttattcttgaatagcagcaatacccggaagaacttttccttcgatggcttcaagcaatgcaccaccaccggtagaaacataagaaacaccgctagccagaccgaacttgttaacacaagctacagagtcaccaccgccaacgagtgagaatgcaccgttcttcgttgcttcaacgattgcttcacctactgcacgtgaaccgtgagtaaagttatcgaattcaaatacacctgtcggaccgttccaaaggatagtcttagactctttgataacgttagcgaagatttcttcagttttaggaccgatatcaaggccttcccaaccatcaggaatttcgtcaaccggacagaatttagtatttgcatcattagagaaagcgtcggcaattttagcgtcaacagccaatatcaggttcacacctttttcttttgctttcttcatcaaatccaaagccaggtcaagtttgtcgtcctcacagatagagataccgattttgccacccattgctttagtaaatgtatatgtcatacctcctgcgataatcaggttgtccactttgctcaacaggttttcgatgatttcgattttagaagaaactttagagccacccatgatagcagtgaacggacgtttgatgtcgttcaatactttatcaacagccttcacttctttctccattaagtaaccgaacatcttgttgttaacgtcaaaatatttagcgatcaatgcagtagaagcgtgagcgcggtgagctgtaccgaacgcgtcgtttacgtaacagtcggcataagaagccaatttcttggtaaattctttctggctttcttttacagcttttttagcagccgctttttcttcgtctgttgcgtcttctgccaaccctcttggtttaccttcttcttcagcatagaagcggaggttttcgagcaacagaacttctcccggttgcagagcggcagctttaacagcagcttcttcgcccatgcagtcgttagcgaactgaacttcaacacccagcaattcagacagatgcttgatgatatgtttcaaagagaatttatcggcaacgcctttcggacggcccaggtgagaaccgatgatgatgctaccaccgtcagccagaatcttcttcaaagtaggaagagctgcacgcatacgggtgtcatctgtaatgttgaagttttcgtccaggggtacattgaagtccacgcgaacaaatgcctttttaccggcaaaattgaatttgtcaattgtctgcataatactctatttttatttaaaagtgttttaaagattttcttttagaacgcctgcaaagttactatttatttcgtttctctgctattaaaacgttatttattcttggcttttggtgcctctttcgttactttataggtgttacagaaatatttgcacatcatttgcaaaccgcaggtgtcacattttggggtacgtgcctggcagacataacggccgtgcaggataagccagtggtgtgctatgggaaccagtttctccgggatattcttcatcagttccttttccacactgaacggggtggtacaactgtccggcactagtccgatgcggtgactgacgcggaacacatgggtatccactgccattgccgctttatgaaatacaaccgattgtattacattggctgttttccttcctacaccgggcaattttattaaatcttccatattgtcgggaacttgactattaaactcatttaccaacattttagccatgccgaccaaatgtttagctttattgttcggataagatacactccggatatattcgaataccacttccggggtggtagccgccaacgcttccggagtaggaaaatcccgatacaaaggcggagtgatgatattcacccgtttatccgtacattgtgcggaaaggataacagcaatcagtagttcgtacggattgttgtaatgcagttctgtttcggctactggcacattttcctgaaaccaagcgattactttctcataacgttctttctttctcatcgtaatttgtttttatgataatgaggcgttactttaattttgaaataaatggcggagactaccgtcagacaggcaccgaaaaggtaggctttgtcaaacgtgctgatttcggcgatatatcctcccgtcagcataccgataccgattcccacatcccaggaggtcaggtaagtggaagttgccgttcctcgctgactgttgggggcaaggttgacgaacaaggtattgaaagccggaaacatgattccgaatccgatgcccattaataaagcgattccgaaaaacagaatcgtacaggctgtgtcgctccattgaatcagatacacgcagcctgcgagcaggaagaagctgaacactactaaatataatcccgctgctatcacttgtgtgattcttcctcgatctaccagctttcccgaaaagatacgggagatagccatgccgactgccataaaggtaaagaagaatccggtttgtgtgtgtagtcctatctgtcgggcatacatagcgacatagttggttgtcatcccataaggaatggaaagtagcaacaagctaagtcccgcaggcattcctttcagcaagataaaacgatcgagcgaaatcggctcacgctttacaggaggcttataaggtgtctttaccagactggctgataaaaatcctaatatacatgccccgaatgcgtaacagaatattgttgcaaatgagactccggcgtcatgcagaaaaagtccgaacatcggtccgatagacattgccgtattattggttaaaccataatatcccaatccttcccctctgcgcgaagaaggcataatgtcgattactactgtatttccgcctacggtaaccattccgaaagagacaccgtgaatgatgcggaacataataaataaggtaagagaacctgcaatcagatatccgccgaacatcatcataaatatgaaatatgcgaaaagatagagaggtttacgggcaaaggtatcgagcagataaccggaaaatgggcggatacagagtgctgctaccgtatagcaggaaagaacaataccaatagtagaatttcccgcctggaagaactcggacagatagaacggcaaaacagggattagcaaccaaaaaccgaagtagagcaaaaagttggctgccaagatgaaacaataactggaagtaatgagtctatccttcataattggagaagttaagaatggagagttgagagttaagggttagctatattattctgcatagccactctcaattctcaactctcaactctcaacctgtttttagtatgcgctctcgaattctttcaagaagcgtgtgtcgttttcggagaacatacggaggtctttcacctgatatttcaggtttgtgatacgttcgatacccataccgagagcataaccgctgtatactttgctgtcaatgccgttggattcaagtacgttcgggtctaccataccgcaaccgaggatttccacccaaccggtatgcttgcagaacgggcaacctttaccaccgcagatgttacaactgatatccatttcagcactgggttctgtaaaggggaagtatgacggacgcaggcgaatcttagtatctgcaccgaacatctctttagcgaaaagcagcaatacctgtttcaagtcggtgaatgatacgtctttgtctacatacagagcttctacctggtggaagaaacagtgcgcacggtagctgattgcttcgttacggtatacacgtcccggacagatgatgcggataggaggctgtgacgtttccataacgcgggtctgtacggaagaagtatgtgtacgcaatacaacatccgggtgagcctcgatgaagaaagtatcctgcatatcgcgtgccggatggtcttcggcaaagttcagtgccgagaatacgtgccagtcatcttctatttccggtccttcagcgatgctgaatcccaaacgggcgaagatgtcgataatttcattttttacaatggtaagcgggtgacgtgtaccgagttcgacgggataagccgagcgcgtcaaatccaatccgtcacaaccattgtcctgactttcaaactgttctttcagtgcgttgattttatcctgcgcttttgttttcagttcattcagtctcatgccgacttcttttttctgttcggcagctacgttacggaaatccgccattaagtcattaatggctcccttcttgctaaggtatttgatgcggagagcttcaagttcttcggcattggaggcatgcaaagcctctacctctttcagaagttgttcaatcttagctatcatatttttgatgtattgttattcagtttcttagtaaaaaccgtgcaaagatataattttatcacgaaccatcgaaataatttgtatctttgttgccgatacgcattgaaaatccggcaacttatgaaaaagattgttttctttattctacttttgaccttatcttttcgtcttacggcgcagattgattatctggagccggtgaaacctttcactacttacacaggcgaattgggcgaatattatcgcaatgtattttctttattgaacacaggctttcagcaacaaccgtatgctcgttttgtagcaattccttctttctcgcccgagtatgccatgtcggtagagaagaagggtgggcgttattgtttggtttcgaacacattgtcgcgtacctattggcaagcagagaaaggaacagtgacggtagatacgagatcggtggttatcagttcgtccctttatcagtctttgggtgccatttttcgtacggtgacgagtcaggtgcaggatttggacggttctacggcaggtttggacggagtcgtttattatttcacttcgacggatgcgaaaggtacaaatcagatgggacgtaagtggtccccgaaaaaaggttctttaatggatcgtcttgtgttggtctgtcagtcggcttatatgttatccagaggagaagatatttcggaacaggcggtggcggaagaagctgctgctttattgaaggagttgcaacagcgcactaaggagcaaccggatgcttataagaaaccgatgtatgtcggaatttatcaggtggggcctcagcagaggtcgctttccggcaaacagatagaagaacttgctcatttgtccggcactactccggaagaatatattgcagatcaaatggtttatccggcaaatcttttagccaagaatatatcgggatatgctttgtgtgagtttacgattgataaggaaggagtgattctgcgtcctcatattttgaaagctactcattccgagtttgccgaggaggctcttcgtattgtaaagggaatgccgaaatggtcgccggcactggcgggaggaaagccgacggatagtaactatacgctttatattcctttccgtccaaagttatataagccataggaaaaatgcgtttacatttgggtatcatattcttttttcaatctctcttcatccgaaagcgccttattatcggaatgtcagaagaaaagtaaagggagaaattaactaaaatgcgtctttgtaggcagaggagcgaatacgtctcattgagagaaaaaagctatgctttagcctatgtaaagctatgctttagtggtcttaaagcggtgctttagcgagtgaaagtgacctgtattacaaagattgataaatatcaaatgaataaaagcccggactttcacaagcccgagcatttatattcttaaaaacatctccttgtcttggggaaataagggactagtaaattgctttctagtacgataagtgagatgcattaagagcagaaaagggatgcccgtgggaaataagggaggcatcccttccaagagacaaacatttgaaaatatactttcacaagcataattttcagttgatctctcagtatatttcttttaaagaatttattgtctcgtataataaaacttgtaaagagaaggcatctctagtcccaaagagaattaggatgcctctcaattataagttattcaatctaaattatttgttcactttaacatagattgatgctgttttcgtcataccccacttgtcaagaatattgatgttgactttacaagtaggagcatttataatggctcctgcggtctgattctttccaatagtaacagtgttcattttttgttctgttccagactgtgcagcagcttcagttcccatcttaaactcagtgttgtcaattgtcagataagttttagcgtcatcatctgctaactcaaccttaaccgatacaattctattatcatcaaagccatagtcattagcacgagcatcttttctgatgaaatcactttctagtatttcgacagtacctgttccttctatttcaatcggattatcctctttctcacctttctgtacatcttttccgtcgattttgaacttcttcacaaaatcgaaactaccttgataaatttcagataatactttcaagttaaattcgtcaacaatagcattcaaacgagcatttccgaatggtgcataagtaaccgtaatgctacgacttgtattaacaccaccgtgtgcaggagaaggttcaactgaaattgccccattactagtcttttgctctgttaaccatgctttagctactttatcaccactcttttccggtattacttctgtgaatttcacaaagtcattagttgttgcatcaccttcaagaatagaattagcttgatacaaggtataaaggttgaaagaaataagtttaggactattaccttcatatactttaccgtaagctacagcattcttttcatcctcaaagtaagcagttgcatgtttgaatgtatacagattcttcggctgatctacagtaatcttgaatgtagtttcgtataaatatttattacccagctctgaattgttttgatcatagtttttattcttgaatttaactgttgcggtatgaggtacagcagcaatatattcaggatcgaatgtagctttgattacatacttagtaatgtttgcttctgcattcgcttctttaccttttgcatccagaccttgtaatactaaagtaatactcttagacgtctgattttcgtatgtcagattcggtactttattaattgttactgtcacatcagtatattcaatttcggaatcaatgccattaatagactttttaatttcatctactgaaggaccaacaatttcagaagtagctgttaatttcttgccatctacaacccaagtcatatctttgatttcagcctgtttagctacataagcaaaggtcagttctacgtcagcactagcaactgttccactaacaggaagatagtgaatcttaatcgtcattttaccttccttcttcgcgataattgtattcttatctttatcaaatgttgcgtccaccttagcagcttcgtccttagtaacttcataatagtaagctaccaccttatctaattcactgttaaacagttcatccaaattatagctcttctgataagtcaaggcttcgtcaggagcagtaaactcgacttctggttggtcttgttctgtagcagctttagccgcaacctttacgtcatatccggaaatgatttcattgccccatgcatcttttgttgtaagagcataagcagtattctcctccaaggccttcaattctgtatcagttactccatttgcaaatctgagagtcaaatcataaacacctttgttagcagtaggttctttttctgggtctgctacacgagtcaaggcatctacactaaaattatctgcaatattagctacaacaaagctagtattacctttagaatctgtcagaccgatttcgtaagcctgaatatctgcagctttcagattcaccggattaatcaaagcgtgaatcttgctaccacctctggcaataagtaaatcacctgctttcttaaatttcttgtttccattaaattcaatatctttccctgctactccatagtacaaagtagcttcagcttgtgtagagcttaaatcaacagtaccttcctctgttacaccgagcacactcataccagtgatacgagcagatttcggcatagaaaccttttcccattctcctgtttccttattgagaatattcaatacccaaaccaatggattgctagcatcagcacttacatagatatctgtagcagctttaacatttgtttttttaggttctccggcttccgcatcccaaaccatccaatatccgtcttcagaaatttgcggtgcatatccatctttacccggagttcctactcccgcatcaccttttttaccttcagcacaaatacctaggtcattgccattgacaatccagttctttgttaccggatcaatcttgattgtcgttggagtagcatccttaccgcttgtgatagaataacttttattatcattaaaagttattttaaatccaccggtaatgtcttcaacattagttacccatttaccttcttttacaaacttctgtaactcggcaatgctagctttgtttgcgtcaatctgtgtttgcagattgtcaatgtcatcatcgtagtccttacagcctacataggtgacagtagaaagtgccaacgccccgaagaacatcacttttacaaattttcttttcataactacttaaaaattacattaataatatattattaaacactaagtttcaataataggcagcccgttactttgtaggtaacggggaaacctttgttcctgctcttttggagtagtcaatacagaaaaattatacgatagattatgaaagttctttacccctgcttctgacgagcggcagaggggaggaaaatctttggcataatttagaggttaacaaagccctaaaataaagaatccgcgtgttttatctatcctagttctgtttttgagtagtttattggaaaaaatgtttgatttcgtttggttgttttaagaaatatgctcatatttgcaccggaatttctccccgttacctacaaagtaacaggataataatcaggtatttaatcctattactgagtgctttataaaatcgagaacttgtttatttgcttcatcaatttttttgcttcggaaaggcttgaggtatgtttccgttacagtgatggacgaatgtcccatagcttcggaaataatacccggatgaatttcgcaataataagccgtcgtagcccaagtgtggcgggcggtgtacgagcttaatttatcgcctagtcctaataactctcccagcaacattagttgttgattaaagctacgcaacgccaactgatattcacgatacgcttcttttgttccttctcggctttccaaaaaaggaaagagataaggagaagaagaatcgcggttcatgtatttctttaccagaatcattgcttccggagtcaacgtcaccgacaggggacggcctgttttacgccgacgatacgtgatcacgttatcacgcaaatcactcttgcgtagataagcaagatcgacaaacggcatacctcgaagtagaaacataagaatgaaaaattcttgtgcacgacgcatattcgaagatgcacccgaagattgtgacaatttgcaaaagacccttttcatatcttcgtcacttaatgcccgcttatgatcggcacgagttcccgtatacaccgaacggaacagatgcggaacgtatggtgcccgatgaagatcgacggcacgattgtaaacggcacgaaaggtacgaagataggtagaaaccgtgttccaactacacccacgaccacgaagataaacttcgaacccttttaaccactctgaagttacctcattgaaggcaaaatcatctttcccacgataagcaataatggcattgagactgctgcgatagacatgagcagttccaaagtttccctccatttgtagcccataggctacttgcttcataaatcctaatacttttgacatctcacaatttattgattaattcgacaataaagatacgagtattctcattaatatggctggttttgtgccaggatttaataaaggtattgtttctttaaaaggaagaagtcgttcctcggtgagaaacaggtcgtttcttttaaaggaacaggggcttggttttaaacccaaaatagatgtaaataagatgttgaatatcaagatgctgtgttatggctgatttgggccgatacatatatgtttgttagggagaataaaaatgattaaaactaagaactttttgcctgttttattgtcttgtttctataacctattaaaatagaaaagatatggatgatatgattaacagacacgattcgattgccgaagagaatatcgaaccgaatggccgtccggctaaaaatcagtttgaagaatggagcagtgaagtaactgaccgtgcagataatgttttcaaagatgatacgaaagacggtcctatcaagaaccgcaagaaacgtataaaagaaatggatgaagtaatcaaaaaggaccttgaataaaggtcctttttttatttggtgggtataaaatgtagtaaagccacttcatataagtaaatcaaaaaaaagagtaactcgttgccgaataactcttttgaagaagtggagcgtatcggactatagctttgaccacaattgctttggattaattttgtatactattgtagatcagtaatgtatgtggcgaattgcatctttttatagcacataaaatcatgtacgctcaaaaaaaggggagtagaaatagacgcttactccccacgattttttctttctaaatttgctccaaactaacaaataaagtagtaagatatatgatgggaattagtcacagttgtagagcttttctacacaagaacggacaggttatgattcgcgtcagatggaataacaggaagtgtgaagttggcttttctgtaggttgcaatgctgatcttgaaaaatgggataatgagaaccagagagtcagatacaacactactcataaagttggtggaaaggtatatgttgcccgtgatattaataatcgcatttctcaatttttggaatgtattgaagaatctttcacagagtatggtgtacattcccaaatccctaccacaaaagagttgaaagagttggttaatgagaagctggggagaatagaaaaggagatagtagtagttggttcaatagagagagaaaaatcttttcgtgaaattttcaatgatttcttagaagtttgttctatagaaagaagttggagtgaatctgtacatcacaaatatgttcaagtatggaatcaattaaatagctgtgatccagatatttctctagtgatacttgatgagaataaaatgacagaattaaaaaaatgctacgtgaagaatggatatcgtaatcgtaccactgtaaaacaattcagaatattaaaatcttttcttagatggattgctgccaatggttatcttgtaggacaaggagtactcaactgtaaggtaaacttaactgtgactaaaaagaagttacttttctgaaatataaagaattactccattttgcatctttccaatttcctaaaagtaaagagtacttagatagagctagagatatatattatccagagttttaataatgcttcttttcaattcatgataaatgttgaatcccataatgcttaattgcttggacgtaattgataattctagggtacttggttagtcaatatcttaaaatctttagcaaaccaatctgctgatttagttttgttgtaaaactaagatggtcaaggtaatcaatgaaagcttgccatttactgctgtctatgcttcctaaattgaaaggaaatccactatttaaattatttatacgaatcagcagttgacaatcatctacctttttgcttgttaaaacgttattattaagttaattatctcattaattatttctcaattttattgataatcagtgtattataagaataaagtcctcgttgttctaataatgattctcaaggagaaagaattaaaacttataaaaatatatatgtatatctgcgatgtttacgagtcttcactcaaattctactaccagaagttcagtaataacaatcatccttttgccaaggaatacctgctttcatggttcctcgacttgtcttcttcttaccaagcattcaattatagattgattttgatgccagaagcaattagggaacttgtctggctgttaattcattcaaacctcaagattgtggcagtatgaaatcattagtcgacccaatgcctatcattacttgctcgggaaagaacaaagcaggaaagatgtccactgagattacttccagaggatattattcgacaaaaaacgtatattacttcggactaaaactccatgtagtggctttccgtagaaaaggaattataccttttttcttgaactgcttatactttccgctgcggatgaaaatgactcaactgtattgtattcaaaagagtaaggtgtgggaaatcagaacaatagagaaatatatgccgataaaatatattcagatatactattctataaagagacgcaagaatgcaaaaaactctcgttatttactcctgtaaaagctatcaaaggagaatcacctgaaataaccaaaagggagaaagtggcaagagacttgttttcaacggcagtttctaaagtcagacaactcattgaatcattgttcaactggttgaatgaaaaaacaaatattcaaagagcgatgaaggtcagatttacatctgggcttctagtacacacgatgggaaaaatagccatcacattgattaccctaatttttaactaatgaatcaaatatagattcgcattatttatactttcggtataatatatggctacattgtgactgtcataatataggcgaagttcttgccgagtagtatcaaaacttattcctatttgatgtcaatctccctcgtttagggtgttttttctacagttggtcggtaatcatgttgtactccatttctattgcttacagatagcatgtaggaaccattttttgagtggttaatagttatcctttatttttattggaattaaattttttattacttaataacgcttttgctcctaaatggtatttcgaactacttttcgttcagagatgagaaaaaaagaaacgcttgcctgattattcaattgattcagttcaattctatgtctataggtggcattaatttccaatagacaaagctttgtctgaagttccggtgatatatcggtagggatcattatattcatcagggattccaaattcgatgttggtctgttgtgtggaatgaatttggttgtttcttgtgggaccataaataattccttgttttttccaacgtgtcaggaaatactctaatgattttcggaaacggacgtaatctttttgtattgggagcgtccaaaaaacttctgcatatgcacctatgcgagggtaaatatgatagttcatactttctacagtggggatccattctccccacatctgacaactggctccgagaatttgaggaactaaatgtactgggaagttttccggtacaggcttgaattcataggcacgttgcaatgaaataggtttgaattcgtatgtcgcttgtaaagaatcatattcataactataatttaagtaggtaaaattgttgtaagagttgactatatgctgcccttgttcggcagcacgttgcagcatgtcggaatctcctttccaaaattgtacgatagtacctggtgctaaacgttcggttccttctttatctccgctttgaaagtggtgtagtttttcgcctgtaatgtcattccaccccatcatacgccaccccttttgagcaattactttcgacatttggtttgtgaaccatacttgtatgtcggaagcggaagaaaatcctttttcttgaataaatttttggacagaagatgatgcattccattggtcataccgaacttcatctccaccaatatgtaatattcccgaggaaaataacgcggtcacttcatctatgacatcattaagaaaattcaaaactttcggatctgtaacattgaacacgtcgtattgaactccgaaattgcagggtacttttatttcttttcctgttgcacttaaccaaggataagctgcaatagcagcagcactgtgaccgggcatttcaatttcaggaataatagttatatgtcgttcggaagcatattttataatattacggatttgtgtctgggtatagaatccgccatgtggcttgccgtcgtaatggtgactttcgtaccattccatttgggtagagtcgcgaaatgctccgatttccgtgagacgagggtatttttttatttcaatgcgccaaccttgatcatcggtcaggtgccattgaaacacattcatctttagcaaagccatttcatccagaatttgctttactaccttttctcctttaaaataacgtccttcgtccaacataaatgaacgccacgaaagtgcaggatagtcagttatggtcaattttgggattatccattttcctgcttccgatttgataagttggcgcaacgactgaatgccgtaaaatatgcccgttgccatttgggcgcggatagttattttcatgtcagttacttccaactgataggcttctttttcttcctgcatgaaggaagcatcgtagcaaagagaaatatcagctttggaaggttttactatttgggattttaatccgaagtcttctgtgagtacctcttgcagtttcttcagttcttgtgtaaaaagcggatctgctcctatttttacgttgtctgttagattatagttaccttgttttattgatacttgttgtggatatggaataagaagaaggttcctctcggtagcctttcctgagatacatattaataacattgtaacgcatataaataatacttttttcatggctaaataaatttaaataagaaaaattgaggacgtgcgtaaatgcggaagtcacgaactattcccgttaaaaatgcgccttcacgtgaaggtaggcggatagattttactttatatatttcattcatgtcaatgattatacagtgtggatgatgtcccggtttatttggactcgtatgccaaaaagaagaaatgtcgctatctattagattttcagctatgccaatatttttatctgtttgttcattatcagcgtatacaattctgcaataaaatagggaccacctttttggtatcgatctacaatcttaaaatatcatctcctaagactccattgatagcaggaaatactccctcaagatgaccggcttctatttgccctcctctgtcacatgtgagaagtggaatgtcgaatcctgctttttgaatcatattttttaaagcactcagatatatcttatcatcgccataagaaccatattcattctccaattgtaccatgaggatgttgtcccttcggttaatagtttgtgaagatagttcttctcccaatcgcataatatacctttcacatgcttttaaaaagtgttcatttctacttcggaaaaccataccttcttcatttaagagcctataaggatatcctccaaagtcccattccgcaaatacataggggcctggacgtaataatacataaagactttcttcttgtgtcaattttataaaatgagataaatcagcttgacctttgaagtcaaaaatacctagttgtcttttatgaaaattccccaaaacgtaagtagatatggtatttaatcccattgcttttgttcttttcaaacggtctctccaatattcgtgaggaatacacgaataatgcatttcaccacaaatcagttgtgtcctttttccaacaatgaggaaagaaccattttctattttaaaacgttgctgggctgatgttaattcgcaacatagtataaacactattagaaagaatacttttatcaatttcatattttaaataaaaagcttaatcacttttgaagtattatggaatgattgctggattgtaaaatatacttttgcaatattttttaatacttatttcttttaagttgttgttgtataatgtaattttgcgatacaaagttagaaatacactatggttatatgtgttattttttgatatatctttttataaatttgatacaatatgaaaaactctgaaaaataccttttacactacctgactgctaattattcaaatactgctaaatgggggattttatgtactacagtgggatatcagattgtggccccacgttgtcattatccattgtctatacatccagacaattataactttaagagatatggtaggatacttcatgaatatcaatttgtctatattgtagcagggagtgggtatttcacttctgattcttgtgcaactaccaaagtatctgcaggtacgataattatgttgtttccaggcgagcgacatacctaccgaccggatgcaaatacaggttggactgaatattgggtggggtttaaaggggatggagcagatgaatggatacgtaatggttatttttccccttcaactcccttgttgaatatcggtattagtcaatctattcttgagctctatacaaatattcttgaagttgttgaggaagaacgtaccggatatgcagtttttattgcgagtattatatgccatatgttaggagaagtgtattataaaagtcaatgccggattaatacttctgttttggataaaataaatctggcaagaattatgatgcggaaaaacttacatacgaataagacagcggaagcaatagcaacagatttaggagttagttattcatggtttaggaaagctttcaaagagaacatcggaatttcacctgctcaatatcaattgcaacttaaattgagtaaggccaaggagcttcttacaaatacggatgattccatatcggagattgcttatcaattaggattcgatagtgttagccatttttctttgttttttaagacaaaagagggggttacggcaagtgagttcaaaaaatatgcaagacctaaatattgattagggatattccaaaaataactgaaataaggggatcagatagaactttaacatttttgaagtcaggcttatttaatatgttttacaaagtagttttacttattaatgagatatgcagaatttgcaagacttcgtatgtcgaacgttctagttacatatcatattggataatggctacgagacagtaagtgatgatagtcacgctaatctgtattcggacagcgttctcatcggttccctgaaaaatctttatcttgaggtgttgcttcagccatttgaagcacagttcgactaatcaccttttataaagattggcaacattgagtgtggataagtgtttggtgtctatcgggaaagtgaatcatgttcatcttcttcatcacagaagcggacgaacttgaatgtttcagaccggagttttggataaccttaattccgcaacactattacaaatataactttttaagtacctgagcaacaaaaagttgctcaggaatttgccatgtcagatttttcacctatcttagtgttgcaaatcaaaatatgtatcaaacccgacagacatggcaaaggtagcaattaaatccgagaaactcactccttttggaggaatattttcaataatggagcaatttgactccagactctcatctgtaatcgactcaaccctcggtatgagatgcaggctgtatggttatcaatacagcgaaatcatccgttcgcttatgagcgtttatttttgtggcggctcatgcatcgaggatgtcaccactcatctgatgtaccacctttcgcttcatccgacacttcgcacatgcagtgccgacacgattcttagagccataaaggaactgacccaggataacatttcctacacatccgacactggcaagacctacgacttcaacacggcagacaagctgaatacactgctcctcaattgcctattgtccacagggcagctgaaagagggcgaggggtatgacgttgacttcgaccaccagttcatagaggctgagaagtttgatgcgaagcctacatacaagaagttccttggttatcgccctggcgtggcggttattggcaacttgattgtcggcattgagaacagcgacggcaacacaaatgtccgtttccaccagaaggacacgctgaagaggttctttgaaaggtttgaacaaaacaagcttattatcaaccgtttcagagctgattgcggctcgtgttctgaagagatagtggaagagattgctaaacactgcaagaccttctatatccgtgctaaccgatgcagttcgctctacaatgacatctttgccctcagaggttggaagaaagtggaattgggcggcattgagtttgagctggcctccattctcatcgagaaatggaaagggaaggcataccgtcttgtgattcaaagacagaagcggatagacggcgaactcgacctgtgggaaggagaatacacctaccgctgcatccttacaaatgactacgagtcttccgagaaagagattgtcgaattctataacctccgtggagggaaggaacgcatcttcgatgatatgaataacggattcggctggaacaggcttccaaaatcctttatgggagaaaacacggtgtttcttctgcttatggcactcatacgcaacttctataaattcatcatggcgaggcttgacgtgaagaggttcggactcaaagcaacaagccgcatcaagacgtttgtctttaagttcatctctgtgccagccaaatgggtcaggacatcaaggaagtatgtgctgaatatctattcatgcaacaatgcttatgccaatgtgttccagaatgactttggataacaccgacaacttatagtcgtgattttgcgtattgcctcaagtcgcatggtggggtaaggggcatttatatgtctttatggtgacattcgatgcactgtgccccctttttactaacgatgcagattcttttcgcttctgtatcatattaggcgcgtagttgcggatttgagggataagaaatatacttaagaattagttagaatactttattatatgtatcattatagtataaaaatcaaataaaggttcttcttcaaatttggtgataatctttttttatttcttagcctcacctctttttcctcacggtcaaggaattgttccccagtgagaaactgtaattttcccggtatataaaaagaaaatccccgaaaataggggattattccataatttcagattcagtcttggctacgataatctacaacaagctggtatctctgaagatgttggttcattgacggtctttctatatacggccggcaagggggcttcctgtccttattgcggacatttcagtcactaattgcacagttgctactcccaacatattcaggattttgaagtttacgatcatactttggagttagtcataagggttggtaaatattattgtgacaatgtttcttgtctgcaaaaaatattctgcgaaccattgtcttttctggttcgtcggtatggtagacggagctatcttgttgaggaacgcatcagatcgataagcttgaaacttaccttccgaaaggtttcttttcttttgcaattgtttcatataacggtcagtagctcttcctgcttacgcatcctacaacagtacgggcaacataatcttctaatgcataataaaaagtattgatgtgggtattgatgattttgcctataaaaaaggtaaggattatatgggggtggtcgtaggccagatgacacctattgctttgttagaggatagaagcggagaagcacttgataactggctcatctggaatcctcaaatacaatatatgatgagagaccgtggaagatgtttcacagagtctataaacagaataatccccggtgttacacaaatctgcgaccgatttcatctaatcaagaatatgacggatacgatgataccggaaatagagaaaataattcgtcagaccaagtaaaagctcaaatatgaatatcctgacagagatacggcttcttcgttaattctccagaacatatttaccatgggagatgcccgacacagagaaaaattgaggatatacagggaaagtctgaatttaaaaatgcaggggatgatcattgagcatacagccacacatttgggcaagaaaagctactacatttataagaacattcacaacagaagaataggagcatacttgaatgggaaacagaagactgctcttaaatatgtatccgaactggttacaatcattagtgcgggttgtattaaccggaaaatattggcaaaaaatggggagtaaaatcagtggggcacttattggaaggatagcatctggcttgcgaagaatgtatcaccaaaagaggaaggaagtcaaggagcataatgagagaattgaaaacagaagtaaaatacagagagtttcacagaatcagatatgccaatacattctaaagggaaaatcggataattctaaactagcggaactgtataagtcctcaccatagattaaagaatttttaaacgtatgtacgaatttcagagatatgatcaatgggaatacttatgataaggatattagaaaatagattgaaaaagcgaatgcaacacgtaacatggcactgacgaactttgcatatggtattgaaaaaagacagggagacagtacaggcagtcattgatgtccccttcagtaacggattactgggagaccagtgaataaaattaaagcggtcaaaagacaaatgttcaacaaagccggaataaaactactaagagctaagattctgcattcataataagaggaataccaccaaatttgaagaagcccccgatgtaatatcaaaaaaatatgagtgaataaaaaatacatgtacggtcagaatcataaattaatatatcattttcataaacacaatgcgtatatgattgcgtaattttgcattattaattatttatatcaatattaaccttgctaaaatttaagattatgggcacgtgaaaagcaattaaaaaaatctacttaaatgaagtactcgcatttttaatataccggtattatttatagcgttaacttttatatctattaattttaagctattgaatatgaaaaaaaaacattatttagttacgttgtttgtaacgttgcttgttctcttcgccatttcgtgcggagatgacaatgaaaatgctaatgatactcagcctcccatgattgagtttcttggcgaggaacttgaagggttgcctggtgaaaccgtgaatattaaggctaaagtgacggatgatgctggtattaactatattcagattgaatgtgcagagtttgaatttagtgaaagaattccttttagcgatcagaattatattacagaatatgacttgatacaagctgtgattattcctggaaatgtagaaagaggttctgtgggtgaagtaaaggttgttgtttatgatcattcgggtaaatcgaaaactgaaatactgaatgtattggttacacctgaagctcctcgtcttgaaatcagacaggaaatgggttttaatattgtattgaatggtggtgtcgctcacgtcgataataatgatgtaacattcagtgttgcagataatttggtattacctgttagccttatcatggaaagtaataggacgaaattaaagactctcacagtgaaaggcacggcattgggtattgatgaaacaattgatttaaccgctatagcaacggacgaaggacgccatgttgaatttactaaagattatccgataagtacaagcggtgatttggacaaaaaacaggttgtatttacgctgacggatgaagacggaaatacagctaaatatgatccaatggtttctgtcaaatcgacttttgcagagcataatcagaaacacactaagatatttacgttggatacttcaattgatttaagtaaagttgtgtttggacttccgatgctggcggaaaagaagagtgtggaaagctataagtttacagcttcttattttgctccggtgactaatacaagaattatctttgtaagtagtaaggatccagagactcaagtaaagtatggaattagtaatgatggacagtatatcataaagtcagataatccgaatccgattatattggagaatgtgggacattacgaaataacttttgatttgcttatgggtacttacgatataaaagctttggataaaaaggcttcgcaatttgaagaaatgtattttgtttttgcttgggaggattatccgccaatgtcgcagtttgactctgagaatgctcctgcagtttggacgattgattataatttatctcgaagtggtgttgatgtatcttttggtaaaggtggcgctgaatggattgtagctacaggtgatgataatcatgatccggaaatatggttgcttaaagaagataaagacaagtatccaggagcgtggttttttgatacaactttaaatgataagatgtatggaaactgccatattgtctttgataatttcttaatgagggcttatgccattcaaaaatagttctaacctctattaaataacaggattccgtaacattcatcgatgatgtatatgacctatcaatgttgcgagagttcaacaaaaccttattcatattatgaaatttaatattattcgaatattgctaattacttgcttactatcatcacaggtagggatatgggcacagaccaaaagcattacgggaacagtctgcgatacaaatggagaaatgattattggagctaatgtgaccgttaaaggaactacaaaaggtactattaccaatgtctatggtatttatactgtgagtgctactccgaaagatataattgagatatcctttatcggatataaaagtgtacagaaaaaggttggcaacagaggaattatcaatgtagtactggaagaagatagtaaaatgctggatgacgtggtggttgtcggttatggtacgacgaagcgggcaaaccttgccggagcagtagctactgccgaccagaaagcatttcagtctaaaccttcagctacaccgattaatgcgcttcagggattaatccccggattagtcgttaatagaagtaacggtcagggaagccgtcccggtgacgaagctacttttagtgttcgtgatgtctcttctgtaaatggcggttcgcctttggtacttattgatggtgcagagggaaatataaattttttgaatcctaatgatattgagagtgtctccgtattgaaagatgctcaagcctctatctatggtaatcgtgctgctaatggggttgtattggtcactacgaaatctgctgcaaaaggtaaggtgaaagttgattttaatgcttactatgcttttaaaacacctggaagggtaaaagagaaagtaaacttgcttcagtttgccgaaatggacagagaagcttgttccgacggttcggataatcctgtatactctgaagatgagctggacttgattcgtgaaaatagtgataaggtagtgatgggtgggtatcttggttttgctaagcattatcagtatcatgactggacgaaatctcttttgggaaaaagctcagggctgcaaaattactctttgaatgtatccgggggaacagacagatataacttttatgtatctggcttctatcagtcggaagattctcctttaaaatttggtcacgatgatagtaaacgttattcactgcgtgtgaaaaatgaagtgaaggttctagaaaaccttttgttccattccaatatttcatatacggcacatgatcatgatttttcttcagctatcggcactgctttggcatgggggtatagacaaccaccttgggcaccgctttatactccgtctggtaaattttattcttggcaaggatatggtaatccagcacaagaactggaagaaggaggaaataccctttatgccaacgctattactactttcaattttgcattggactggaatattttacctgaactgaaaatttctggacaggctatcctgagaagacaggtaaatgatgataccactaatggaggaaaatatgctcaatggaattgggatgattcgctgaatagatataatacgactgaaaattgggcttcaagagctttctctaaacaatggtaccgtaactataatgtttatgcggaatatcataaactattcgctgagaaacatgatttgaaggtcatggcgggtgcacaacatgaagaattctcttatgatactttctcggctacgcgtaagaattttacaagtgataattttaatctggcattaggtagttcgaaggatcaggaaacaggtgctgccacttgggcggaaacgttgcgctctgtgtacggtcgtttgagttatgtatacaatgaccgttatattgttgagattaatggccggtatgatggaacttctcgttttgctccaggacatcgttggggattatttacaggatattctgctgcctggcgtctgtctgaagaagattttattaaagatttgaacatttttgaccagttgaaaataagaggttcctgggggcaaatgggtaattgtcagggggggatcggacgttatgactatattccgattattaacatcagttcggattggccttatccattcaataaagaggagaagagtcagcaggcatcttccaacatggtctctttggcacgtacttgggagaaactggaagtaacaaatatcggactggacatagcaatacttaataatcgtttgagcgccagcgtagactggttctataagaaaaataaaaatatgttgattgctgtagattatccgagtctgttgggtgcgactgctccggcatccaataacggttctcttgaagtgaaaggttgggaagtttctttggcatggagagataaggtgaatgatttttcctatagtgtccgtggtaatatttctgattctcgcaataaggttactaatttgggtggattttccggactgcgctcgggcttaatatcaaatattcagggttattctaccaatgcatattttggatatcaatcaggaggaattattcgagacgaagctactttgcgcgagtataaaaaaatgaagggagttccggataatctgcgtgtgggtgatatgatgtatctggatctcgacggtgatggagcgattactgcgacgggtgatcctaaacgtggatatcagggtgatcttgtgtacttaggtaccagtaatccccgttataatttcggtttgaatatcgatatggaatggaaggggtttgatctaagcattttttttcaaggagtggccaaacgtaaagttgtacaagacggagaacctttgatacctttctatcctgactggcattatccattgtccgaattctatcataatacttggtctgctgaccgtccgaatgctaaatatccgatattgactcatgacgatgaccgtaacttatggaactatcgtacatcggataacctgttggtgaatgcggcttatgtacgtttaaagaatttacagtttggttataccattcctcgctttttgactcagaaaataaaggtagatcgtttgagagtttattttagcggaaatgacttgtttgaaattgataatattcctttcaaatatgatcctgaagataatgggaattattctgggtatccgtttatgcgttatttctcgtttggtgtaaatcttaatttttaattgattatgaaaaagaatatattttatagttttatagtggctatactattgtcttcctgccaaggaatggatctgatgcccgcagataaaatgtcggatggtgactattggctgacggaaaatgattttaaaatttatgcgaatggcttatatccttctttaatgaaatttaatggggatgataatttagcccaatatgatcagaaagcggatttgtcaacttcttattttggatttaacagtgtgagtaatggtcgttggttgccatcggagagtgatggagtatgggatgattgttatgcatatctacgcaagattcatattttattggagcatgtcgatgccttgcatactactgatccaaagattcttcgatacaaaggagaagcgttgttcttccgggcataccagtattttaagttgctcaatcgttttggagatgtccctttagttacacattctttggatattgattctcctgaactgtttatggaacgtacgccccgtaaagaggtagaagatgccatcttgcaggatttgtatgatgcttcactattattaccaaagaagtctgaaatggcagtagccgaaaccggacgtataaccagtggggcagccgtggctttcagggcaagagtagcactgtatgccggaacctgggctataaatcataaacatcgtagtgatggactggcattattggggattgccaaagaatgtgcccggcaacttattttcgacaaaccggaatatgatttatactacgaagcgtcattaggtgcggattcataccgtaaattgtttttggaagatggtgataattcgtgcgagtctattcttgattatcagtatgctaagaacatgaaaggaactttccatgatatggctgataaggttagcgctggttatcttttggcaaccaagaagtttgccgatatgtttttggataagaatggtgttcctattgataatgtagaaacgtgtttccagggttatgaaagtgtgcaatcggaatatgaagaccgtgatccgcgtatgacttgtgtcttgcaggtgcctggccgtaaatatatttatgttagtcaacatggtgtggctactgaatgtccggttagttttatgggtatttgctctacaaataccggatatcgtgtgtggaagtatatcagtgaactacctgatatttatcatgtaggggcttattacaatgcccacattatccgttttgcagaagtcctgttgatttatgcagaagctacctatgagctggaaggcgagattagtgataatgatttgaacaactctattaaccgtatccgtaaacgtgtaggaatgccggatttaactaatgagtttgttacaaagtatggcttggatatgcgtgaggagatccgtcgggaacgtacgattgaactctgttttgaagccaaccggtatgatgaccttcgtcgttggaaaacagctgaagtagagatgccgctaccgttgaaaggcgtaaagttctctaattatgcagacgagaatgaagaattgagtccatctttggatagtgacggatttgtaataaccgaagataaccgtaagttccgtccgggacgtgattatctagccccattgcctaccaaacagataaatatgagcaacggtcgactaaagcaaaatccgggttggtaagtagaatctgattgagtatatttgaatgcctctcctttgaacttttcccctttttaacagaaggacgaaggagggggattcaataaaacaaataaacttttatatgatgaaccgattttttatagttctgatttttgctttttccttgagttcacttttgggaatacaagcaactgaaggaaaatggatcgccccttccgatgccaatcatcccaatacgtggatgactttccggaaagacattatcttgccaaaacgtccggagaaggcggttgcacagattgccgtggatagtaagtattggctttggattaacggacagcttgctgtttttgaaggaggagtgaagcgtggaccgactccgaaggacacctattacgatgaggtggacttagcccctttcttgcaaaaagggaaaaatcagatagctatattggtctggtatttcggtaaagagggcttttcgcacaagagtagcggacaagctggattgctatttaatttagaaagtaggaaatttgttttgggtagtgatgaaacgtggctttgccggattcatcctgcttatgggagtgcggatgcaccttatcctaattttcgtttaccggaatcgaacattcgttttgatgctcgtaaggatatgacggggtggcagacaactgaatgtccggaaacgctgggatttagtaacgcactggtgttaggaacatggggagaagctccttacaataaacttataaaacgtcctattccgcaatggaaagacttcggtatacgttcttttgagtctatgcgcagattgaaaggagaacaacaggatacactgattgccttgttaccctataatttacagatgactccaatattggaaataacggaccctgtagggggaaactgcatcggcatttatacggataatacatatgcagcgggagatattaatctgagagctgagtatattactcgtcgaggtcggcaatcttatgaatcactaggctggctgaatggacatgaggtttattttattctgcctaaaggtatcgaagttaatggattgaaatatcgtgaaacgggctataatacagaaatgaccggaagttttagctgtgataatgattttgtgaatcgtttttggaagaaggccttgcgaaccctttatgttaacatgcgcgatacgtattttgattgtccggaacgtgaacgtgcgcaatggtggggtgacgaagtgattttaatgggagagtgcttttacacttgttcatcttccgtttatgctttgatgagtaagggcatcaaggagttgattgcttggcaacattctgatggagcactttcttcaccgattccggcgggtaattatgatagtgaattgccgggacagatgttagccagtatcggatattatggcttttggaattattatatgaataccggtgatcgcgaaacgatagcgcaggtttatccgggagtgaaacgctatttggagttatggacattggatagcacggggttaacaaatttccgtggaggcagttggacttggggggattggggagaacaacgggatatccggcttatctttgccggttggcattacttggccttaaaaggtgctcggcaaatggcacaacttttgggagaaacaactgatgctaataattacagtcggcagatgaacaaggtgaaagaggggtataatcgttgctggaacggatatgcgtacaggcatccagagtataatgattgtacggacgatcgcgtacaggccctggctgttgtttccggtattgctgaacaagataaatatccgtatatcattgacttgtttaagaagcaattctatgctagtccgtacatggagaaatatgttatggaagcactctttgtaatgggtgagggcaagtatgctatggaacgtatgcaaaaacgttttgctcctatggtgaaccatcctttctataccaccttgtttgaaggctgggatatcggtcccaatggtttcggtggcggaactgtaaatcatgcctggagtggtggtcctctgattgtcattgcccgttatgtctgtggtatagagcccttggatgcagcttataaaacatttcgtatagcaccggatgatacctatttgcatcaggcggctatcaccatacctactatagccggtgagatacgttcttcttttgaatcgtcggataaagattttaaaatggaaataacggttcctaagaatacacaagctattctgcaactgccaaattcggtaaatggagaggttcgtgtgaatggtaaggttctctcagaacagggctgtgctttatctgccggaacatataccatattagcaaaaaaaatagataaatttaaaaatttaaaaccatgaagaaaatgagtatatttctttgcttttcattcctgcttttaccttttgcaggatgttcagatagtgataacggtacaggtgaaagtagtggaggcgatggagtttccctagaagatattagagtcattccattgccacaatttataagttatggacgtggagcatttgcagtagataaagatgttacaatcagttgcacagcggcaatagaagatgaagccactttgttggcaggttatttaaaagaagatcacggtatggaaccggtggtcagtaaggataagacagatgctaccattcagttagtaatagatccggcgttgacggtgaaggccgaaggcggatatcggatagaagttgccaataacaaaatcgtgttaacggctaaagataatttggggatcttttacggatcacaaactgttcggcaattgattacgttgcagggcaatttatttgtggtacgtgaagttagtatctcagactatcctgttttttcatggcgttcggtgatgcttgacgaagctcgttatttcaaagggaaagaagctgtgaagacgcttctttatgaaatggcacgcttgaagatgaacacctttcattggcatctgacggatgatcagggctggcgtattgaaataaagaaatatcctaaattgattgaagtcggttctaaacgtaaatgctccggtttgggttgggaatgggaaaatgatcaatttgataatattcctcagtctggtcactatactcaagaggatatcaaggagatcgtggcttatgccaagaaattgaatataacgattgttccggaaatagagattctgacgcatagctctgcagcaattgcttcctatcctcagttgggaaccactaaaaaacagatagaggtggaatgcagaatgggggtgtttagtgaaataattgatgtctcggatgatttcgctatacaatttatgcatgatgtactggatgaggtgatggctttgttcccgggtgaatatattcatattggtggtgacgaagcacacggaaatcattgggctaactcgcagtctattaggagcctgaaaaatagtctgggcattacggaaaattttgaattacagatttggtatttcaatcagataaataaatatctgaatgaaaaaggacgaaaaatgatgggttggagtgacatggcaggccccgtaggagttgcctctaagatggcggtagatatgcctggagctatctctcaatattgggcaggttcggtagatgtcttgaatcattcgttaagattaggctttaaagtcgtgcagtcgcacacggattttgcttatttcaatgcagggctacagaatgcctatctaacaagttgtattccggaaagagtagatgctactaaagtaaagaatataattggttttgaggcttcttgctggagtgaatgggattcaacattggaaaaaacatttgaccatatctttccccgtattgcagcttatgccgagacggcttggagcaagcaatcggcaaaagattacacaaactttaagtatcgtttgtctccgatgtgggatttatggaaggcacgtggtatttatgtcggaggaatggatgagaaaaactatccgggacccggttggtgaggaaaaaagggagaactgaatattatataatgtaaaagtatacgaccatgaaaaccgtaaatgcagtatactttcggcgaaggactatctaatgaaagaatccttgaaggcatggtcaagcctttcgcaagttaatcttttaatactaaaattacatataagtatgaaaatgaatctccattgttttgcgaatcttatttcaataatgattctcgagcttttctcaaatagcggactgataaacgcaaccgaatttggaaaacgtactgacgcattggaagcatcagcctggaacgaatccaaatggatttccgcagtagatgcccctgtagtgaaaggacataacaacggtcgcgcagccgatggcgcgagttggttcgtgtccaccgtgaaaaacgaacagaaaattgtctccgccaagtggatgaccgctggactaggagtttacgagttatatgtgaatgggaaacccgtaggcgaggaattcctgaaaccgggcttcacacactatgccaagactaaacgttctttcacctatgatattacagacatcatccgtaccaagccaaacgccgagaatatgctctccgtacaggtgacgccgggatggtggggtgacaaaatcataacccccggaggatatgacggcatgataggtaagaaatgtgccttccgtggtgtactggaactgactttctctgacggaaacaagaagcgttacggtactgatcttaaaaactggaaggctggaattgccggtccggtgaaacatgccggtatctttgacggagaagagtacgatgcacgcgaaccgatgggttacgaatgtgtggacaaactctccacacccgaagagaacaccgaattctccggtgatatcctgccttcggacggggcggaagtctatctgcgtacagatctcgccctcgctcctgtcaaagcatacgtttggaagaatgtagaaggagcaaaggagaatgagtttggtaaggtgattatcgcccgtgagttcgcatcgggtacggagatgaccgtaagtccgggagagacattagtggtggacttcggacaaaattgtgccagcgtaccttctttcgtattcaaagctgccgaaggaacagtgctgacctgccttcccgcggaattgctcaatgacggcaacggcgccaagattcgtggaatggatggtccggaaggaagttgccaccgtgaaaatctgcgcattccccacactggtatccgtctggattatacctttgctagcggagataactatgtggcctattatcctcactgtaccttcttcggttaccgctatgtctccataacttccactgggaatgttgccatcaagtcgttgaagtccattcccgttacttccatcgcaaaggaactggaaaccggcactatcactacaggcaacgaccttgtgaacaagctcatctccaatacttattgggggcagctatccaactatctgtctatacccaccgactgtccgcaacgcgacgagcgcctgggctggacagcagacacacaagtgtttgccgaaaccggtacgttctttgctaacactatgaagttcttccacaagtggatgcgtgacatgcgcgacacccagaacagtttgggtggatttcccggagtggctcccttggcacaatacggcgatgagaaaatgcgtttgggttgggccgatgccggaatcattgtgccttggacggtatggaaacaatttggtgacacgcaaatcattgaggagaactggaacgctatggatttgtttatgaactacatcaacgatacaaagtataaccacgagaccctctgcggggagaacggtaactaccaatgggccgactggttgagctacgaaccgctggaaagttgtagcggactggctttctctccccaaggtccgcttcctgatgccgtcagctactggaactacttgagcgcttcctattgggtgatagatgcttccatgatgcgggatatggctgccgccacgggtcgcgatgctgccaagtaccagcaaatgtctgattcggcaaaggcatacatcaaagaaaatttcctcaatgaggacggtaccttcaaaaccgccattctcaacactatgcaaactcctgccttgttcgccctgaagaaccagcttttggaaggcgaagccaaagcgaagatgatagaccgcctgcgcaaaaacttcgcacaacacgatctttgcttgcagaccggatttctaggcacatctatccttatggccacccttacggagaatggcatggaagacattgcctatgaactcctcttccaacgtaagaacccaagctggctatattctgtggacaatggagccaccaccatttgggagcgatggaacagctatatgatagacaaaggaatgggaccacgcggcatgaacagtttcaatcattatgcctacggatgcgtatgtgaatggatttgggaaaccgttgccggcatcgcagccgatcccgccacccctggcttcaagcatatcattatgaagcctattccggacaagcggttaggacacgtgactgccgaataccgttccgtctccggactcatcaagagtgcctggaaatatgagggggacacctggatttgggaatttaccattcctaagggcgttatcgctaccgtaatccttcccggagagatgaagtcaaaggagtatgtaagtggaacttacaaggtgaccaaatagtttctcatgtagaattttatattaagaggttttataaaaatacttgttaatgaaaatgaggttgtctaacaagtgccgaaaaaagaaatctctgtcagagttcagttcagaagggggtgaaatcgttgagaagagccttgttagacagtcttaaattttttaatttgggtattatgacacacattcttttctctcgttttggcaaaatgtatgtctatgtatttatttattatttggtaactatgtacaatcttacagcttaattcttgttgaaatattttgttataatataaagtttttatatagatatgtaattaaaaaagtcggaagatttaagagcaaaacaattataaatatattcttttgtatatgactacctaagtttataaatatttcattgaataatagacatatagcgataaaagtattaaatttatagtgtctaattatagagtttaaacgattaccgctatgttcccaaaatttaaagttacggaaatttattgtatggcagatgatttatgcaaggaatttgcattgcaacagaaaaaatatatggttgaaaacaagaactgcaagcaccggaataagccgaaccgtatgagcgatacggaaataatggttattcttatcctgtttcattctagaggtttcagatgcttcaagcattattataaggaatatgtctgcaagcatttgaagggtatgtttcctcaatgtgtattttacaaccgttttgtggaattggaaaaggggtactacttccactgactatttttataggatgtgaggatattttagtggaaaactgtgtgggttggacggattgcaccaatgtgtttttggccgacccgtggagtgcggaacgtttcgtgaatctcgtccggattatatccagaatgtgacttatagaaactgtatcgtattggagacacctacattgtatgataacaaggaaggggatgagggttggagaggaggatgtgcggctattaatcatgtgttggcatatacgaggaacttggcggtggggtggacggatgtctgacattccgttcgagaatatacaatttgagaacttgtatggcggacgaccaattgctgtggagatagtaagtgacggtaaagatacgggaagtttgtccaaagttgtctttcggaatataacttttacagacgacaaatatctgcctgctcaagtgcggagagtgagtcgtgagtttcctttgcggaatgtggtatttgataatgtcatgtttaacggaagacagataaagaaggctgattgtagaaaatatctgtttgtcaatccatatatagagaatttacaacactactgtcccgtaaaagtggataattagttctttgaaattattgaaatatagtcaattacgcggttttttaaaatgaaacggacttgattttgcaactttgcagtctaatacaaatggctgctatgttccaagacaaatacgtattctctcaattaaccgcttttctgaacaggactcagttcaacaactatgttcgcaagtatgatggcaacagatatgtgaaacatttcacttgctggaatcagatgctcgcgatgatgtttggacaactgagtaaccgtgaaagcctgcgagacttaatcgttgctttcgaggcgcatagggccaagcaatatcatcttggtttaggtcgtgaaccgatagccaaaacaactcttgcgacagccaaccagaaccgtgattacagaatcttcgaagactttgcattctatatgatgaaggaagcctgcgagaagcggacgaccaacatccttgacatttccggaaagaaatatgcgtttgattcaacaacgattccgttgtgtcttgcaacattcccatgggcaaagttccgaagcaagaaaggaggggtgaaagctcatgtcttatacgacattgaagcacaagttcctgctttctataccgtaaccactgcttcaaagcatgattccacagcaatgtcttcaatccattatgaaccaaatgcttattatatattcgacagggcttatgactcctttaaagaactctataggatacatcttacagactctttctttgttgtcagagccaagacaaacttaaagtataagacagtcaaatggaagcgaagaatgccaaagaacataatgacagatgcggaagtgaaactgaccggatatctctccgagaaaaaatatcctgagtcattcagactcgtccgatattacgacgaagaggatgaccgtgagttcactttcttgacgaatgcaaaacaactttctgcactggatgtcgccaatctttataagaaaagatggttaatcgagctgttcttcaaatggctcaagcagcatctcaagataaagaaattctggggcacaacagagaacgctgttcgcatacaaatcagtgtggctattatcacgtactgtcttgtggctattgtccaacatgatatgaagttgaaacgttcaacctatgaagttttgcaaattctcagcatatcattgactgacaaaacccacttgcgtgacctgttcgacaagactaatttcaatgatgtcaaagatctaaatgatcccctgattccggggctttttgattaattgtttaactcgtcccattttaacgggacactaatgaatttacaatttaaataaatacaaattaccatgaaaaaactattaacaactttattgtttggaagctttttttcggcttgtgctgaaagacaaccggttcctgccattccatcagatccggaaatagaaggaaaaatagagaaactgcttaaaggcatgacccttgaagagaagattggccaaatgtgtgaactgaccattggggcagtgacagataaaaacgataataaattgagtgaagcgttactggatacggtgattggtaaatataaggtaggttcgttactgaatattcccttcggagtcagccaaaaaaaggaagtattcgcagaagtgatcacacagattcaaaagaaatctttggaagaaattgggattccatgtatttatggtttggatcagattcacggggcttcatatacacaagacgctacttattttcctcaaggcatcaatatggcggctgcttttaatagggaactaactaggcattgtgcggagattacggcttacgagactcgcgcttgttgtgtaccatggacgtttgctcctgtaatggatctcgggcgcgatcctcgttggccgcgtatgtgggagagtttcggggaagatgcctatgtgaatgcgcaaatggctgtgcaggctgtacgtggtttgcagggggataatccgaataaggtggatgaatatcatatttcatcctgtatcaagcattttatgggatatggggttccagtctccggtaaagaccgtaccccttcttctattaccgatattgacatgcgtgagaaatactttgctcctttcaaggcggcgattcgtgcgggtgccttgtcgctgatggtcaattccgccaataatagcggggtggcgtttcatgccaataaagagttattgaccggatggttgaaggaggacttgaactgggatggaatgattgtgaccgattggaatgatattaataatctgtattttcgcgaccatattgcaagcagcaagaaagatgccgtcaggctggctgtcaatgcgggtattgatatggcaatgattccttcggagggacagttttgtatcgacttgaaagaactggttgaggaaggggctgtttcaatggaacgtattgacgatgccgtacgacgtgtattacgtttgaaattccgcttgggattgtttgagaatccatactgggatattcggaaatatgacaagtttggaagtcgggagtttgcagaagtggcattgcaagctgctagggaatcggaggtcttgttgaaaaatgaaggagaacttttgcctttacgtaagggaacgaagatattgttggcaggtccgaacgccaatgctatgcgttgtctcaacggaggatggtcttacagttggcagggagagttggcggatgaatttgcgcaggcttataatactatctatgaagcattatgcaacaagtttggtacggaaaatattatctatgaaccgggagtgacgtatgttgctgatcctaatgataactggtggaaagaaaatcgtccggaaataggaaaggcagttactgctgccggtagggcggatgtgataatagcttgtataggagagaatacgtattgtgagactccgggaaatctgaatgacttgaatctttcttccaatcagaaagagttggtgagagcacttgcggcaacaggaaagccggtaatattggttctgaacgaaggacggccgcgtattattcatgagatagaacctttggcaaaagcggtggttcatattatgttgccgggaaattacggaggagatgcattggctgacttgattgctggagatgtgaacttcagcggtaaattgccttttacatatccgaaattcatcaattcgcttgctacgtatgattataagccgtgtgaacagatgggacctatggaaggggagtataattatgatgcggtcatggatgttcaatggccctttggatatggattaagttatacgtcctatgagtatagtaattttaaagtgaatcgtacgactttcaatgcggatgatgaactgatatttgaagtggatgtaaagaacgtgggagaaagagcaggtaaggaaacggtcctgttgtattctagtgatttggcagctagtgtttcaccagatgtgatccgtcttcgttattttgagaaagttgaattacaatcgggtgaaacaaagaaggttgttatgaagttgaagggaagcgacctggcttttgtcggtcaggatagaaaatggcggttggagcaaggacgtttccgcatgaaatgtggtagtgagatactgtatatagactgtgaaaaagacaaaatttgggatactcctaatattgactaagcagaaacagtataacctcaaatccgcaactacgcgcctaatatgatacagaagcgaaaagaatctgcatcgttagtaaaaagggggcacagtgcatcgaatgtcaccataaagacatataaatgccccttaccccaccatgcgacttgaggcaatacgcaaaatcacgactataagttgtcggtgttatccaaagtcattctggaacacattggcataagcattgttgcatgaatagatattcagcacatacttccttgatgtcctgacccatttggctggcacagagatgaacttaaagacaaacgtcttgatgcggcttgttgctttgagtccgaacctcttcacgtcaagcctcgccatgatgaatttatagaagttgcgtatgagtgccataagcagaagaaacaccgtgttttctcccataaaggattttggaagcctgttccagccgaatccgttattcatatcatcgaagatgcgttccttccctccacggaggttatagaattcgacaatctctttctcggaagactcgtagtcatttgtaaggatgcagcggtaggtgtattctccttcccacaggtcgagttcgccgtctatccgcttctgtctttgaatcacaagacggtatgccttccctttccatttctcgatgagaatggaggccagctcaaactcaatgccgcccaattccactttcttccaacctctgagggcaaagatgtcattgtagagcgaactgcatcggttagcacggatatagaaggtcttgcagtgtttagcaatctcttccactatctcttcagaacacgagccgcaatcagctctgaaacggttgataataagcttgttttgttcaaacctttcaaagaacctcttcagcgtgtccttctggtggaaacggacatttgtgttgccgtcgctgttctcaatgccgacaatcaagttgccaataaccgccacgccagggcgataaccaaggaacttcttgtatgtaggcttcgcatcaaacttctcagcctctatgaactggtggtcgaagtcaacgtcatacccctcgccctctttcagctgccctgtggacaataggcaattgaggagcagtgtattcagcttgtctgccgtgttgaagtcgtaggtcttgccagtgtcggatgtgtaggaaatgttatcctgggtcagttcctttatggctctaagaatcgtgtcggcactgcatgtgcgaagtgtcggatgaagcgaaaggtggtacatcagatgagtggtgacatcctcgatgcatgagccgccacaaaaataaacgctcataagcgaacggatgatttcgctgtattgataaccatacagcctgcatctcataccgagggttgagtcgattacagatgagagtctggagtcaaattgctccattattgaaaatattcctccaaaaggagtgagtttctcggatttaattgctacctttgccatgtctgtcgggtttgatacatattttgatttgcaacactaagataggtgaaaaatctgacatggcaaattcctgagcaactttttgttgctcaggtacttaaaaagttatatttgtaatagtgttgcggaattaaggtataaagaaactgattgcaataagtgtaatatccgttgttatagctgcgtacaatactttagaaagggtggaggattataggaatgtaattcctctatcacatgaaatagtaatggtagctgggaatccttttgttattgaaaaagatacccgcattctttatcttgaagataatattcttttagaaaggaacacacaattccttgccggatacattaaagaagcgacaggaaggcggttaaaagtggaatccggacaggatgtgaatgacaagaatatgattatatgaggatgtaaattaaactgtgtcagcaaaaaataaaatattaattttgctgacacagtttaatttacatcctctatatttcagttcaaaaaaatgcgtaaaaatattccagaagaattatggcaaatgagtgagcaaagagaattgtatgttgtataatattgtatctacacagtagacgtgtaattttagcatggacttctaaatagaattattaattcgatcgatatttatattcttaagtatttgaggggctttatattctaaaaagtactttactctttggaattccaaggcattttgtttgcctttgtgttaatcaatatattgaatatgaataatagtaataataatcagataattcgttttgactgggcgatgaaacgtctgctccggaataaggcaaactttagtgtacttgaaggtttgcttactacgttgccgggtgagaagattgttattcagaaactccttgaaagtgaaagtaatcaggaggataagtttgacaagtagatatgcttgccgagaattctaaggatgagcttgtcttgatcgaggtacaggataataatgaatatgcttacttccagcgtatgttgttcggtacttctaaaagtatataaatagaggagagagttatgacaaggtacgtaaagtatatagtattaatatcgtctatttctcattaggtcatgggacggacttcgtatatcatggaaagacagaattcaggggtatttatcaaggggatattttagaactgactccatttcaaaagcaaacattcaaggtggatacagttagtcagttgtatcctgaatactatatcttaaaggtaaatggctttaatcagatagccaagagtccgttggaagaatggatttactatttgaatacaggtgagattccttctagtgctacagttctagagcttgaagaggcacgggagagattgaagttggatagcatgactaaggatgaattggtggcttattatcgtcacttggataatatagtaattctgcatgataatatctataccgaacgagaagaaggaagggcggaagggcgtgaagaggctaattgggataatgctcgtaatctgaaaaaaactgggagtagctattgatataatttcacaagctacgggattgtctaaagaggaaatagaaaagttatagagtaaatcttgaataagttattgattgaggggacatacagtttactgtgcattcccttttttattgctgttcgaaatagagatgatgagaacgaaaaaaggaattttagtttaatttgttaggaaatgggggatgaatagagttaaagtaatataagtatagtgctttctgagtggggagtaaagccattagtgaaaaagaaaaagctctgaaaatcagagctttaaatcttttgtaagtggagcgtatcggactcgaaccgatcaccttaacactgccagtgttacgctctagccagatgagctaacgccccttctttaatcttatatgataacgtttgtaaacgaatcttttttgttggcgcaaatataatgcaatattctgaaataattgctatgtttgcggtaaataatagtttaaaataaagaaatgctgatttataatacgacttttcaggtggatgacgacgttcacgataattttctgatttggattaaagaatcctatattcccgaagtacagaagcacggtgcattgaagacgccgcgtatctgccggatattgagccaccgggaggaaggaagtgcttactccttgcagtgggaggtagagagtagcgggatgctgcaccgctggcatctggaacagggagtgcgcctgaatgatgaacttacaaaaatatttaaggataaggtgattggttttccgacattaatggaggtgatagagtgattcaaccggtaaaagaaaagataatcctgggtattgaccccggtactacgatcatgggatatgggatcttgagaataaaaggaaccaagcccgaaatggttgcaatggggattatcgacttgcgtaaatttgccaatcactatctgaaactacgccatatccatgagcgtgtattgagtatcattgaaagctatctgcctgacgaactggctattgaagcaccattcttcggcaaaaacgtgcagtcgatgttgaagttggggcgtgcgcagggagtagcaatggcagtggccctaagccgtgacataccaatcaccgagtatgctcctttgaaaattaaaatggctattaccggaaacggacaggcctcgaaagagcaagtggcggatatgttgcagcgaatgcttcgcttttcgaaagaagatatgcctactttcatggatgcgacagacggtttggcggccgcatattgccattttctgcaaatgggacggccggcattggaaaaaggatataatagttggaaagattacatagcaaagaacccggataaggtgaaataattgaggatataagttctatgctataagtttataggtgcgataaagcactatatatcaaaggaaagggttaagatgaagatgggaactaattatttagcaatactgggagtaactacgatgacaacagtgatgagttgttcttctgcaaaaaaggaatacgcttcttatgaactctatcccgttcgttcggggaatcttgtcgaaatggagtatgctccgggggctaccaggtttacgctttgggcgcctacggctgatgaggtacgcctgatgctttatgatgcaggggaaggtggtcatgcttacgaaacggagaaaatggaacctgctgaagacggaacatggacggtaaccgtggacaaagatttgctgggtaaattctacaccttcaatgtgaagattgatgataaatggcaaggagatacaccgggtattaacgctcgtgctgtcggagtaaatggcaagcgtgctgctattattgactggaaatcgacccagccggaagggtgggagagtgaccggcgccctaccctgaaatctgctgccgatatgattatctacgaaatgcatcatcgtgatttctcgtcggattctacttcgggggtaaagaacaaaggaaaatatcttgccttgaccgaacgaggaaccatgaatgctgataaacgtctgacagggatcgaccatttgagagaactggggatcacgcatgtacatctgcttccttcttatgattatgcttccgtagacgagacgaagctggaagaaaaacaatataactggggatatgatccgctgaattataacgtgccggatggttcttattcgaccgacccttatcagcctgcggttcgtgtgaaggagttcaaacaaatggtacaggcattacatcaggcaggtatccgagtgataatggacgtagtgtacaaccatacgttcaatacgatagagagtaactttgaacgtaccgctcccggttacttttatcgccggaaagaagatggttctctggcaaatggctcgggatgcggcaatgagactgcaagtgaacgtcctatgatgcgtaaatttatgatcgaatctgtcctttactggattaatgaatatcatattgacggcttccgctttgacctcatgggaatacacgacatcgagacgatgaacgaaatcaggaaagctgtcaacaagattgatcctactatttgcatttatggagaaggctgggctgctgaagctcctcaatatccggcggattcgttggccatgaaaggaaatgttgcccgtatgccggatatcgctgtcttttcggatgaactgcgtgatgggctttgcggacctgtatgggaaaaagataaaggtgcgtttcttgccggtgttccgggaggagaggcgagtgtaaagtttggtattgtgggtgcgattgaacatccgcaagtgcgctgtgattcggtgaattatagccggcaaccttgggcgaagcaacctacacagatgattagttatgtttcctgtcatgacggattatgccttgttgaccgaataaaggcaagtatgccgggaattactcccgaacagttggtccgtctagataaattggcgcaaacggtggtctttacttcacaaggtattccttttatttatgctggcgaggaagtgatgcgtgataagaaaggagtggacaacagctacaagagtccggatgcggtaaacgctattgattggcggcgcaaaactacgaatgaggatgttttcacctattataagcgtttgattgacttgcgtaaatctcatcccgccttccgtatgggagacgcggaaatggttcggagacatttggaattcctgcctgtcgaggggaacaatctgattgcgttccttttgaaggagcatgcgaacggtgaccgttgggaagatattatcgttgctttcaactcccgcactactcccgcacgtctggaagtacctgccggcaaatatacggtagtatgtaaggacggtgtgatagatgttcgcggacttgggacgcaaaccggaccggaagtaattgttcccggccagtctgcactgattatgtataaatagataaaaataaaagaatatgagccaaaatacattcagcatggcggggggcgtagcacgcaacccgcttgtgcgtttagccaaacccgtcacggcaactatcggggcagacgaacatatagccattgtaggaccgaacggtagtggtaaaagcctttttgtagatacgctgatcggtaaatatccgctgcgtgaaggagcgctgcaatatgatttttctccttctgctactcagaccgtttatgataatgtaaaatacatcgcttttcgtgatacctatggagctgccgacgccaattactactatcagcaacgttggaatgcccatgaccaggatgaggctcccgatgtccgcgaaatgctgggcgagatcaaggacgagcaactgaaaaacgaattattcgaccttttccgtatcgagcctcttctggataagaagattatccttctttccagtggggaattacgcaaattccagctcacaaagaccctgctgactgctccccgtgttctgattatggataacccgtttatcggactggatgctcctacacgcgaattgcttttctctttgctcgatcgtctgacgaagatgtcgtcggtacagataattctggtgctttccatgttggatgatattccttccttcattactcatgtcattcccgttgacaaaatggaagtctttccgaaaatggaacgtgaagtctatttggatgctttccgttcaagagatacggtcgttccttttgacgatttacaacaacgtatcattgatttgccttacaatggcaataattacgatgccgatgaagtggtaaaactaaacaaagtcagtatccgctatggtgaccgtactattctgaaagaactcgattggactgtgcatcgtggggagaaatgggcattgagtggagaaaacggtgcgggtaaatcaaccttgttgagtcttgtttgtgcggataatccccaatcgtatgcctgtgatatcagcctgttcggacgaaaaagaggaaccggggagagtatctgggaaattaagaaacacattggctacgtcagtccggagatgcatcgtgcttaccttaaaaacctgccggctattgagattgtagcaagcggtttacatgatagtatcgggttgtacagacgtccgcaaccggagcagatggatatttgtgaatggtggatggatgtattcggtatcgcagcattgaaagataaagcattcctgcaactttccagtggcgagcaacggctggctctgctggcacgtgctttcgtcaaagatccggaactgttgattttggatgaaccgcttcacggacttgatacttacaaccgtcgccgggtgaagaaggtgattgaagccttctgccaacgtaaagataaaacgatgattatggtgacacattatgaatcggagcttccgggtacgataacagaccgcattttcctgaaaagaaattagatggcacaccgttcaagtttggtttctaatcttcttttatgaattgattattctattcatttatataagttattgactaaggtttttctcaaaccatgaaggtgtgtcgtaatacacgatgcgccttcttttttttcattgactataaaaatcggttcattttctttaagctgcgatattttgaggatttctttggtttatgtgttcgcaacatctaaatagagcaactgtaagctcataaaacggtctaatcagccaatccataccttctttagtcatttttgcacacatcttttttatattgaaggcaatggcaaagaaggaaaagtccatgaagaccttatcctttccaaaatggcggaaacgtttgtaattcatattgtttttcatttgtccgaacacggcttccggttctatgcatctctgtcctctgtgtttcagtccttcctctgagcagagcagctctttggctttttgcttgtattttctgagtctgtgattcaactctatcgttctgttcccctttgctttaaaacatcggcatcttagcggacagccttcacatctgatggctctgtacgtggcattttcgctgacatatccggatgctgttttcacatgtctagtccctatcctttgcatcttctgtcccatggggcagatacaaaagtcttgttcttcattgtagtagaagttttccgccctgaacgggtccggtttgaatctcggccgctgttccatgtggaagtagttgtatttgacgtagcccgccataccgttttctgacatgaagcggtaattctcctcagaaccgtagccggaatcggccaccaccgtatgggccaacctgtcatatctgcttgagaaggattgcaggaaaggtatcatggtcagtgtatccgtagggttcgggaagagtgcaaaatcggtaatgaactggttctcggtgccgatctggaggttgtaaccgggctttgtctggccgttacgcatggcatcctccttcattctcatgaaagtagcgtccttgtccgttttggaataggagttcctgtcctgtagcgtgttcagacggttgtcgtattcctgcagcttgtccctgtgttcttccagttccttcagctgtttgcgtttctttttcaacgcagtcttttcctctttcgtggagggctcaggaacctgttcaagtgctttccgcaattctccagccatttcagtcagcatggccggagtgaactcaatctcctcattgctttccgatgagttctcctgggcgatgacatcgtctatctgccctaacaggacatgtatcttcttcatcaggcgttcacagttccgctcaaccgtttttcgccagacgaaagtatacttattggctttggactcaatctttgtcccgtcaatgtattccacattcagcctgatgaagcctttggaagagagaaggagtacggtttgggtaaatacctcgttgatttcctttttcacccggttgcggaaacggttgatggtaatgaaatcaggtttctcatatccggcaagccagatataatggatgtcacgatgaaggagcttttcaattttacggcaggagtagacgttgttcatataggcatagagaatgaccttgagcatcatcctgggatggtaagggctgcggccgcattccttatacaacttcctgaaactttcaaggttcaggctctcaaccagagcgtcaaccatccgaactggatcatgctctgcaatatcctcgtcaattctttgaggaaaaagcactgtttggttggaattataaggacgaaaatgtatctttgtcatagtgaaaatcttatgcctaaagatacaaaatctttaggtaataacaaagccccagcttgtgaaagtcggggctttgtgcttaaaaaaaagaaggtgcgcattttgacacacctccctttttctcattactatgagaattttttctcgtcatggtgagaataatccttgccctgaatgtattgtaacggggttctggaagtaaattgtgaacctgctttccgggttagccgagtggatgtgtaaaccagaaacaggaaccctttccgggttccgagtctactccgatctttcctccgagttgtgtgatgatactctggcagatagaaagaccgagaccggtgccgggaataaaattattgagtttgacaaaacggttgaatacagccgtttgcttttccggttcgattcctatacccgtatcctctacggagaatttcgcttcttttccttttatttggtaactgatggttatactcccttcggaggtaaattttaacgcattgactacgaagtttgataatacttggtaaagcctacttttatcgctggtgagttgcaaatcgggcagatcgggagacaggcggagttccacctgcggggaggttcgcatctgcattgcttggtataattcattgcataaccgtttggcgttcactttctcgaaggtaaagtcaaaagttccagcttcgatttttgacaagtcgagaatatcggaaataagttgtagcaggcgtttgttgttctcttcgatgatggtgacatactgcagtttctcttccggattgtccgcctcttgcagcatactcgaaaaaccgacaatcgcattgagcggtgtacgtatctcgtggctcatattggcaaggaaggcagactttagccggtcggattcttctgctttctctttagcttgaatgagcattcgttccgtttctttcagttgggtgatatcaaagttgatgcacaacatttcgatgatattatcctgtgggagataattccggaccaacacattcacgcgtgtccacgtatagtttccgtcagctctgcgaatacgcatatcacgacataatttgctactttcccctttaatgaccttatccagaaaatcaagcattacagcccggtcttcggggtggaagtgggagtgtatgccgatgatttccggtagtggggtaccttcttcctctcctatattcctgtaccagctgctcagggcataaccgtcccggctcaaagcgtcgaaatgggcataaccaactttggcatagtcgcctaccaggtcgaagaaatttttgaactcctgaatcttattataagcaatggtattttcggtcttgtctacgttaatcaccaagtaattgatcggctcatgattatggtcgtacagcgtagttactttggttgttaaatctatactgcctcccgaactttgtgactggtagtatccgtttatcttggaaaattcatagcagaatgtaaagtcggcgtcttcattatttctgagtttctgtttgatctcttccggaagcaggggattctcgaacagattaactcccaagacatcttctttgctggctatatgaaacatttccagttccttcttgttaaggtcgatcaggagcccgtctttattgtataattcgatgcctacggggatatttttatagatattatgcagaatgcgttcactgttctgcaatgcctggtaagcggacgccatatgtggtccgtcttgtgtttcggctatgccatatatcttggtgtttcctgcctcgtctgtttcctggtaacatatcttgctgcgtatccatacaccccctttaggagtatcgagcagatatacttcttcaatcgtctgctgtaattcatcgaaagagtgggaagtggtgtgttgctggtcttccctcagaatccgcttgttgaaatcattgaaactaataataccctcctcgtcgagaccgagaagttgggctatgaagccggagcatttgtaacactctgtttttacatctgcctcccaccagccgatgttggctttattcattaatttccgtaggaagatgtcttctctgtgtgtgtctgtttcaggcattttacagtttgttctgaaggttaaaaatttgtttaatatgtaaaagtagtcatttttgtcggattcctgctaataaaccaccatttttaggtattgataactccttattctttcgtgaactttgtggagaaataaaatgttctatatataatgcgtagatataaaaagaaaggagatcattaagaatgaaaaaaatagtattacttcgtcacggagagagtgtatggaacaaggaaaatcgtttcaccggctggacggatgtagaccttacggaaaaaggagttgccgaagccgagaaggcaggggagacgctgagagaatatggcttcaatttcgataaagcctatacttcctatctgaaacgtgcagtgaaaactctgaactgcgtgcttgataagatgaatctcgactggattcccgtggaaaagaactggcgcctgaatgagaagcattatggagagttacaagggctgaataaagcggaaaccgccgggaagtatggggaggaacaagtgcttgtatggcgccgcagctatgacattgctcctaatccgcttgcagagaatgaccttagaaatccacgtttcgactatcgatatcacgaggtacccgatgctgaactgccccgtaccgaatcattgaaggataccattgaacgtattatgccttattgggaatcaaatatatttcctgcattgaaaactgcccatactttactggtggtagctcacggtaatagtttgagggggattatcaaacatctgaaacatatttcggatgaagatattataaaactgaacctgcctactgccgtgccttatgtgtttgagttcgacgagaatcttaatgtagccaatgactactttctgggtaatcccgaagaaatcagaaaattaatggaggcagtagccaaccagggaaagaaaaaatagaataaagttatacattaaaaaaatgaagttatgaataaagttatagaattattaggagataaatcctgttattatttggatcacacctgtaaaaccatcgataaatcgctgattcacattccctctcccgatacaatagataaaatctggttggattcagatcgtaatataaaggtattgaatagccttcagtctctcttggggcatggccgattggcaaataccggatatgtgtccattcttcctgtcgatcaggatatcgagcataccgccggggcttcttttgctccgaacccgatctatttcgacccggagaatatcgtgaaactggctattgaaggcggctgcaacgccgtggcttccactttcggaatcctgggttccgtagcgcgtaagtatgcccataagatacctttcgttgtgaagttgaatcataatgaactgctttcttatccgaacagcttcgaccaagtgttgtttggcaccgtgaaggaggcatggaacatgggggcagtagctgtcggagctactatctatttcggttcggaacagagtcgccgtcagttggtagagattgccgaggcgtttgaatatgcgcacgaactgggtatggcaaccattctgtggtgctatctgcgtaacaatgatttcaaaaaaggagcaatagattatcactctgctgccgacctgaccggacaggctgaccgcctgggtgtgaccattaaggcggatattgtgaagcagaaacttccgacgaataacggcggctttaaagctatcggcttcggcaaggtggacgaacgtatgtacaccgaactggcgactgaccacccgattgacctttgccgttatcaggttgctaatggctacatggggcgtgtaggactgattaattccggtggggaatctcacggaacttccgatttgcgtgatgccgtcattactgccgtagtgaataagcgtgccggaggtatgggactgattagcggacgtaaggctttccagaaaccgatgaataaaggggtagaattattgaatgctatccaggatgtttatcttgatccgtcaataacgatcgcttgatacggttgtgaatggaaataatttcttatctttgactattagatagttaaccattaaaaaaataagagtatgaagttttttattgacacagccaatttggagcagattaaggaggcacatgacctcggtgtacttgacggagtgactaccaacccttcgctcatggcgaaagaaggtatcaagggaacacagaaccagcgtgaccattatgtcaagatatgtaatatcgtcaacggtgatgtgagtgccgaggtgatagcgaccgattatgaagggatgattcgcgaaggcgaggagctggcggcgcttaatccgcatatcgtagtgaaagtgccttgtattgccgatggtatcaaagccatcaagtatttcacggagaaaggaatacgcacgaactgtacgctggtcttttcggtgggacaggcgttgctggcggctaaagccggggcaacttatgtatctcctttcgtcggccgtctggatgatatttgtgaagatgggataggacttgttggggatattgtacgtatgtaccgcacgtatgattacaagacgcaagtgctggcagcttctatccgtaatacgaagcacattatcgaatgtgtggaagtgggggcggatgttgctacttgcccgttgagtgccattaagggattgttgaatcatccgttgacggattcgggactgaaaaaattcctggaagactataaaaaagtcaacggttgagagtagacaaggctcaatatatagaacaaacggtgaacatcaggcagttcgttgctgcacagtgttcaccgttttttattttttagttgtcggatggctattcgtttttcttttcctgtttccgcttttccttatactgtgtcggcgtttcgcctgtatattgtttgaaagccgtactgaaatagcgggaagtagtaaacccgactttctcggcgatttccgtaaatgacagctccgtgccagtcattaatgtgatcgctttctccattctgaatttgttaatataatcattggcccccatatcggtaagagcttttagcttgttatagagcgaagcccggctcatgccgatttctttgcagaccagagcgacatccagattactgttatccagattttcctggataatcttattcattttgagtaagaatgtttcgtccgcctgactgaacgtgctctcttccggggcaggaatcaagccggcattcagataccttttcttggtatgttcgcggtttttcaaccggttgcggatgagttccattaacatttctatttcaaaaggcttggtgagataggcgtccgctccgtttttgtaaccgctcagctggctttgtttatcatctcttgccgtcagcaggatgatagggatgtggctgatagtaatatcctctttgatgtttttacacaattcatatccgttcattcgcggcatcattacatcactgacgatgatatccggagtatggctcttgataagttgaagggcttctacaccgtctgcagcaattacgatccgcttgaaatattctcctaatgattttttcaggaagtccgtcaggtcggaattgtcgtccactaccagaatactgtaaggggtcgtgtcgaaattgtcctcatcaggaatctgttcattgtcattgtcgcctatcagttcgttcagatatgccttaggctggcagataatttcttcggtcttttgcttcagtggcagttcaaagaagaaagttgcacctgcttcctgattgttgcgggcaccgatagaaccaccatgcagctcaaccagaatcttggaataagataatccgattcccgttccgctttgttctcctgtcccttgatagaaacgggtaaagagtttccgggtgtctacttgctgcaatccgtttccttggtcgattatggaaatacgtattctgctttcttctgaaagtaattcggaggtaattgtaatttctgtattttcaggactatgtttgagcgcgttgataagcaggttgcttaaaatagtctcgcacttgtccttatcgaaactgacagtttcaatccgtgggtcgagctcataacggattcgcacattcttggcttcaccttcactgataaagtcttgtgatacgtcctcaatccatttattgagcggatgaggctgtatctgcattttactttctccgacttccattttacgcacatcaagcaccatgttaatcaggttcttcatacgttgtgactgtctgtaaatagctttcaggggaaggtattgatgatcttcggaggagagtgatttcaatattctgctaagtggagcgtgtatcagtgtcaacggtgtacgaagctcgtggctgatattgataaggaagcgtactttttcttcatacacttgttgctcgtgctctttcatagcccatttgagcttttcctctttgcgtttcaaggttcttcggaaagtctctataataacggcgacaacgaaaactgcgcaactgaggatgaaccaccatgtacgataccagggaggaagaatcgttaactccagtacttcttggttaggaatccaactaccatctttggccgtacaggaagccatgattttataactgcccggtggcagtgagcgtatagccagttcagggttgtaggattcgatttgttggtcattcaacccttctatctggtatttatatactttttggcggaaaatgtcttcctctttcgacatgattcggatagtaatattgctgttccaaggagcggagatacctttcggattaccgcttaacttatcgttgacggattctccgttgataatgacatttgacaattggagttgtggaagttcggaggtggtcagcgggagcttgctgttgatatgaagcaagccttttacaccgcccatgtagatatctccctgcatacttaataattgaggcttggaaagatattcgtttaaaatagctccatccgactctccgaataggacaaacttcttttctttgatcaaccaggcaaagagcatactgtcggctcctatccatacttttccctgctggtcgcatacgagcagagtaatttcgccgaacagggaagtcggtatcagagtctttgtcttggttccgggatgataatgtatcaatccgtaattgctcccgatccagaagtgtccttctttatctcgtgaaacggagttgataacagtatctttccggcaagagtacaatgctttcaaccggtttgtacggttatccagttcgtagatgtgttttgtatcgtttatataagtataatcctgataattgccaataggtaaaagggtaccgatgatatcttgcccttcctgctcggtagcaatattgaaagtctgttctttcagattgtatttataaacatgatctcccaggaataatatgctgtgaggcgtgttttgtagtaaattcacggcttttccccggttacagagacgggtgttcgtttcattatcgacaatggtgaagggatgtttttctcctgttgccggattgaaaatgaatactccctgcgagaaaagggaaattaataatttaccgggagtaaacggacagatagaggctactttgtcttcccaagtcgaagggtaatgggcgaatttctccgtaaacgggttaaagctgtttatgcctcctccgtccgtacctatccagatccggttttcggattcctgaaaaaggctcaaaacagtggagttgcttaatccgcggtcgttgccgggcaatacatctttatatgttttcatagaaacttcccggatgctgattaatccgtttcggatgctgcctgcccacatattattattccggtcgttataaagacataagatcgaattggcaggaagtgaatagttatctcttccggggatgtgttccaatagggaaaattgccccgtttccgggtcaaggatattgatgcctcctccgtctgttccaatccatatctgcccttcccgttcggcgaggcttaatacaacattgttgctcagataagaattgcgggtggtataggtggctagcagttttccgtcgcgggtcaggcaattcaagcctccgttgtaaggtgccacccatatccttttctgtgaatcgatgaatatattcatgatttcttttccgcaatcgaaagggggagggttatattttccggtttttaagtcgagtagtagtaagccctgccaccggctacaacagagcagggtatgttcatcccaaagggtcagcagggtgacattgtaattcggttcccgctcaaatgattgcaagaggcgtaaggaagcatcctgataattatagaaaaagattttattttttgaaccgaacaagacgcctccttttgtcaggcaaactgaataaacgataatgttatttcccgactcattcgttggtatgaagaagtcatcactctgccgtcgatagcgcgccactcctttgtccgtcagaatccagatattgttttgttcgtcttctatcatctgatagataaaattatgtggaatggaatgaggatcatcggcctgatgaacatattttttgagttcatgcccgtcgtatcgtcccagcccggaacgggttccaatccatacaaagccttgttcatccgtcaggatacagcgcacggtggaaggtagtccgtctttcagggagatttgtttatagtaataatgtccggcttgaagggggagaaggccggtaaactgtatgataaatgctacgcatagtagtaccaatatgttttttctcatgaaatcaggtcagtttaactgaaacaaagataatgtattcggatgaatattacttaaatcagctctcttattttttagtttttatccctatctttgctcgaaaatatacgattatgattaccgaagaactacaaaaactttatctggcatatacgggagttcccgccgagaatataacagaattaccttcttccggctccaatcgccgttatttccggttggcgggggtgcaaacattgatcggagtttatggaacctgtatcgatgagaatgaggcttttctttatatggcggcccatttccgcagatgcggtttgcctattcctgagattcacatcgtgtcggaagataaaacctattatctgcaagaagatttaggagacactttgttgtttcatgccatagagaaaggacgtgccacgagtgtcttttccgaagatgaaaaagaactgcttcgaaagacgattcgcctgctgcccgctatccagtttgccggggcggacggatttgatttctcccgttgctatccccagccggagtttaaccaacgttctatcctttgggacctgaattactttaaatactgttttctcaaggctaccggcatggagtttcaagaggataaactggaagatgatttccagaagatgagcgatgttctgcttcgtagttcttctgccacttttatgtatcgtgacttccaaagtcgtaatgtgatgattaaagacggcgaaccatggtttattgattttcagggcggacgtaagggaccgttctattatgacattgcttctttcttatggcaggcaaaagcaaaatatcctgatagtctccgtcaggaactgctgcaagaatatattgaagcactccgcaaataccaaccaattgacgaaccttatttttatagccagcttcgccattttgtacttttccgtactttgcaagtgcttggagcctatggctttcgtggctacttcgaaaagaagccccattttatccagagtgttccttatgctatcgggaacctgcgcgaactgttgaaagaggaatatccggaatatccgtatctctgtaaagtattgcgtgaactgaccgggctgaaacaatttacggacgatctgaaaaagcgccagctcacagtcaaagtcatgagttttgcttataagaaagggattcctgacgatccgacaggcaatgggggcggctatgtttttgattgccgcgctgtaaataatcccggaaaatatgaacgttacaaaccttttaccggactggatgaaccggtgattaccttcctcgaagaagacggagagattcttcgttttctcgatcatgtttatgccttggtggatgcttctgtgaaacgatatatggaacggggatttagtaatttatctgtttgttttggctgcaccggagggcaacatcgttctgtttattccgcccagcatttggcggagcaccttaataagaaattcggagtaaaagtagaattggtgcatcgtgaacagaatatagaacgtacgtttgaagcaactatatagaagactaatgaaagctatgatatttgctgccggtttgggcagccggctgaaaccgttgaccgactctatgccgaaagcccttgttcccatagccggacgtccgatgctggaacatgttattctgaaactgaaagcatccggtttcaccgaaattgtgattaatattcaccatttcggtgaacagatactcgattttctgaaagctaatgataatttcggacttaccatacatatttccgacgagcgtgaacagttgcttgatacgggaggaggagtcaggaaagcctgtactttctttgaacattccgatgagccttttttagtgcataatgtcgatattctttcggatgtggacctaaaggaattatacgactatcatttacaaaacggcagtgtggctactttgttggccagtcggcgtaaaacttcacgttatctgctttttgatacggacaggaggctttgcggctggattaataaagacacgggacaagtgaagccggaaggctttcgaccggatgaatcacgttatcaggaatatgcattcagtggtattcatgttctttcacctgctattttccgcttgttggatgttccttgttgggaaggcaaattctctattatggatttttatcttgctacctgccggcaggtggagttttccggttatctggtagaagatttgcgactcattgatatcggtaagcctgaaacactggctaaggctgaaggcttttgttccggaacactacatagcgatgcctaacggggccaaacagctctgtttttagcatgaaacaaaagatttgcgtaaatttacccggttgaacaaactatattgtaaactacgcaaatcttgctgtatggaaaatagatatcatcagactttggtaaatgagataacggataaattgttacataatattttttaatgatttatctgtaggattggaattatacgatagagctggtctcatgatagatattaaccattctcggttgaaattaatgggaggcaaagaaaaaaagatcttttaggacgtaatttgttcaatcatacggcttttcctgatgaaataaagcagcaaagtaaaaaaggagaaagccgtcctcttctttcatctgaaaagtagaccagaccactattttcttatttctttttttgattcaaaaaatgttcaaagatgtctattgtattattattaatcgatgaaatgggtggttttagacaaatttggaaaaaacatagctgtttttaaacacttcactttaaactacgtctttatatttgcaatgaatttcaacgaaagggaattcagaaaaaactttttaatctttaatttaataacttataaaaatgacttctatgaagaacctattgaaagtttttctaatgtgtttcattacgttatttgcttttgcagggcaaataatgggacaacaaaagaccattacaggtagggtagtggatgctcttaatgagggtatgcctggtgttaatgtacaagtaaaaggtactacctcaggaacaataactaatattgatggcgatttttcaatttccgtacctaatacaaagtctgtattagtatttacttttattggatatgtgaagcaggaagttgctgtgggaaaccaaacaaaactgaacattcaaatgaaagatgatacacagagtttggatgaagtcgtggtagttgcttatggaacagctcgtaaaggtgatttgacaggagcactgacgacgatgagaccagatgcgaatgaagctgcaaaagccgtttccatagataatctgttggaaggaaaagttgccggtctagtcgtgagcacggcttcttccaatccgggagctgcttcgtccattacgattcgtggagctagttcgttgcgaggtgataatcagcctctttatgtcattgataatattccgcaagcttcaactggagaattttcttcttcgggtattagcggagactttcagattgctcaagatccgctgtcatcattgaaccctgccgatatagaggatattacgatattgaaagacgcatcctctactgctatttacggttctcgtggtgcgaacggtgttatattgataactactaaaaaaggtaaggagggcaaagctaaagtgaacgcttcggctacttttactattgctaatgcaagcaggttgttggagatgatgaatttagaggaatatgctgcttatcataattcaagaattacggatggcaaagtgcctttccatattgttggagatgaggtgagatatgtatttaatggagcttacgataaatatgatcctgctgatcctgaaacttataatgtagtaaattatcgtaactggcagaaagaaatctatacttctgctttttctcagaactactctttatcagtaaatggtggtgcaggtaagacaacttattatatttccgctaattttaaagatattaatggtactgtgaagcagaccggtttgaagcaaggagacttgcgtgcaaatttgagtgcacagctttccaaatctgtagatttaaacatggcgttaagcggatccttgcgacagaataatatgatggcaggtggtaatactcttggcggtgctactggtgctatttcacgtactgctcttgattatgctcctttcgaattgccggagaatgacccgtcttttacaaatgaaaataaaacgaatgtgttcagctggctgaatgattatgtggacttgacagatgacaaaacttttaaagctagtttgaatctgaattggaaaataaataagtttttcacttatagtcttcgtgcaggtggtaatatcaatacgaatgatcgcaaacgatggtatggaatgcaattgtatcaaggaatgaataatcagggttatctggcaacctctaatctttcaaaaagtaattattcagtagaaaatatagtgaactataatacgaaacttggtagtgtaggtacattggctgcaacagtcggtatgacttatgatgattataattttctaaataaaaatgtgattggaaagaactttacgatgtttgagtttcgtgagaatggaatgcatatggcaggtgatgtaattacgtcgcagcctatacaaaaagattatcagttactttcttatttgggacgagttaatgttagtttgcttgataaatatttgattacagcttctttgcgtgccgatggttccagtaagtttgcgaaaaataatcgttggggatatttcccttctgcatccatagcttggcgtatggaacaagaagaatttttgaaagatgtttcatggctgaatcaattgaagttgcgtttcagctatggtgcaaccggaaatcaaagtattgatccttatactactttttcgatgtatggacaaggatctggtgaaatttcatatgcggatggaacaggaaataaaacgactgcaatggtggtgaccaacttgtcaaacagtagtttgaaatgggaaaaaacatcttcatggaatgtcggattggactttggtttgtttaattcccgtttgagtggtaccttggatatctatcagaagaaaacaacagatttgcttatttcaaggaatttgccgggatcagctggatttagttctacttattacaatcaaggttcattgaataataaaggtgttgaattttctttgaatgcacaagtcattgacagttcatcttggaaatggtctgtaagtggtaatataggtgtcaataggaatgaaatttcagatttaggtttgttgcctgctgattttggatgcttgggtgagagagttgggtattatggtaatagtttaggggatcattttggtgtagggcatattttcttggcaggtgaagctccgggattattttatggttatgtgactcaagggattgtccaaaaggaagatataacagaaaatggaattaagtacattaaacaagatggaagtgtgggatattaccaaacggtgaataaaacgactccggtagccggtgacgtgaagtatgtggatagaaatggagatggtgtagtggatgacaatgatcgcgatattattggtaacccgaatcctgattttacttatggttttcagactaaagtatcttggaaatccttgtcgttgtctgcatcctttaatggggtacagggtagggatattttaaatgtaggtaatcgttacaataacactccgggaactaaatcgaataatgtgacgcgtaaagcgttccaaaatatgtggacggatgagaatccaagtaatttatatccgaaatcaacatttgtcgtacaaaatatggtgatggatcgttatgtggaagatggcagttatttgcgttgttctgatattacactgagttatatacttcctgccaaatggacgaataagattggtataaagaatacatctgtttatgcttctgtaaaaaatgcgtttgtgataacagattatagtggttatgatcctgaagtaaatagttttgcttttgacggtttacgtccgggtgttgatatgaactcatatccgactcctcgttcatttgtttttggcttaaatttaacattctaatttctaaaatcacgaagacatgaaaagaattaaatattatattttattattggcgtcagttggctgtttctcagcctgtacctcttggttggatgaagatccggtctattctcagaataatgcagttgttttttcatcaaggagtaatgccgaattggctctgctgggatgttatggatatatgacgacaacaggggcgtatggacaaatgtggcaggaactgcctatcatagcttccggatttgctttcggacagcgtactgcttctacggcaatttcattggaggctgtacctagtgatgacttgattcctatagcctggaatgggatgtataaagtggtgactgaagtaaatgcttttctggaaagtctggacaaaagcagtttgagcgatacagataaggtacaaatgggaggggaggctaaattcttgagaggattagcttattataatttggtttctttgtttggtgatgtgccattaaaaacggctgcctcttcatcggatggtatttctgtacctcgttctcctcaagctgaggttctggctttggtagttcaggatatgaaagatgctatggctattgatagtaagattgtagacggacgtgcgaattcatgggctgcaaaagcttttttaggtaaggtttattataaaatggcgtgtctgggtattgacgaaactgcaaattggacgaatgccaagaatatgtttgacgatgtttatgaagctcatattttcgatcttgaacctaaattcggagatttgtttggtgattatgtgaccggatcaaaggaggctatttttcagttgaattttacaacttcttctaccgtttgctttaatcgtgcaagtaatcgttttgctcctccgcaggctactacgggaatttcttggggaacttataaagcgtctaaagctgcttatgatttacatgaaggtacttatccgggagatcctcgaattaatgagacatttttgactcgctggagaaaccgtagcggtaacaaccaggctaatccaaagccgactgtgggagatgtactttcacctaatgactctacttacttgtatccttattttgcatatgtaaatggtgatattgacgagtatgtgatgaagaatggtgttgctaccaaagaaaaaaagaaatatgtaggaaagttgccttataaagcattcattgatcccaagaaccctactattgagactattgaaaattatgcttcaacgcatggcgttacattggaaaatgtagctatcaccaaatgtttaaaagaagtttttgtaaaaaccggatctcaaaatgcttggccatgttttcagaagttatatgatcagaatcaggtaggtacagcgagccataaaaacttaatggtttaccgttatgctgaaatgttattgttgatggcagatgtgtacaatgaattgggggacactcctaaagccatatcattagcaaaagaagttctaaatcgtgcacgtaattcgggtatgaaagtttctgctcagccggctgactggccgacatccttgaatcaggaagaagtaagacagaaattgttttttgagcgtatcatagaactttgcggtgagcccggaatgtatgaaatgcctcgtattcgtgggacaaagtattttaagatggctttggagttacataataatcatgaaataacgatagcatctgacgcattgtatcctgctagttctaatgcttggttagatcgtatttataatggtacaagaggattgacggatgaatttttgaaaaagaatttgttattgccaattcctagtagcgagattgacgccaatccggcccttactacttcagacaataattttggctatacgaattaagtagaagcttaaaccccttaaatgacctgataaatttccggatgcggggatatttgtcctggcatccggaatttagggttataatcagtccttttgaacatttatggaaataaaatggcgataaatggaagtcgattattaatcaaaaaacttatttttgccgatgatgaattcttcgtttacttaatttattatatatcctcaaatccgcaactacgcgcctaatatgatacagaagcgaaaagaatctgcatcgttagtaaaaagggggcacagtgcatcgaatgtcaccataaagacatataaatgccccttaccccaccatgcgacttgaggcaatacgcaaaatcacgactataagttgtcggtgttatccaaagtcattctggaacacattggcataagcattgttgcatgaatagatattcagcacatacttccttgatgtcctgacccatttggctggcacagagatgaacttaaagacaaacgtcttgatgcggcttgttgctttgagtccgaacctcttcacgtcaagcctcgccatgatgaatttatagaagttgcgtatgagtgccataagcagaagaaacaccgtgttttctcccataaaggattttggaagcctgttccagccgaatccgttattcatatcatcgaagatgcgttccttccctccacggaggttatagaattcgacaatctctttctcggaagactcgtagtcatttgtaaggatgcagcggtaggtgtattctccttcccacaggtcgagttcgccgtctatccgcttctgtctttgaatcacaagacggtatgccttccctttccatttctcgatgagaatggaggccagctcaaactcaatgccgcccaattccactttcttccaacctctgagggcaaagatgtcattgtagagcgaactgcatcggttagcacggatatagaaggtcttgcagtgtttagcaatctcttccactatctcttcagaacacgagccgcaatcagctctgaaacggttgataataagcttgttttgttcaaacctttcaaagaacctcttcagcgtgtccttctggtggaaacggacatttgtgttgccgtcgctgttctcaatgccgacaatcaagttgccaataaccgccacgccagggcgataaccaaggaacttcttgtatgtaggcttcgcatcaaacttctcagcctctatgaactggtggtcgaagtcaacgtcatacccctcgccctctttcagctgccctgtggacaataggcaattgaggagcagtgtattcagcttgtctgccgtgttgaagtcgtaggtcttgccagtgtcggatgtgtaggaaatgttatcctgggtcagttcctttatggctctaagaatcgtgtcggcactgcatgtgcgaagtgtcggatgaagcgaaaggtggtacatcagatgagtggtgacatcctcgatgcatgagccgccacaaaaataaacgctcataagcgaacggatgatttcgctgtattgataaccatacagcctgcatctcataccgagggttgagtcgattacagatgagagtctggagtcaaattgctccattattgaaaatattcctccaaaaggagtgagtttctcggatttaattgctacctttgccatgtctgtcgggtttgatacatattttgatttgcaacactaagataggtgaaaaatctgacatggcaaattcctgagcaactttttgttgctcaggtacttaaaaagttatatttgtaatagtgttgcggaattaaggtatatgaaaaatctacaatccggactattttactctttgactggcgttaccgccgtaacttcccttgtttcttgttcaatcaaacaaaagcctgcggagcagaaaccactgaatatcgtctatataatgacagacgatcacacggcacaaatgatgagctgttacgacacacgctacatggaaacaccgaatcttgaccgcattgctgccgacggtgtacgttttacccaaagctttgttgccaattctttaagtggtcccagtcgcgcctgtatgataacaggaaagcatagttgcgccaataaattctatgataataccacttgcgtatttgacagttcgcaacagactttcccgaagctgttgcagagaatcggctatcagacagcattggtgggtaaatggcatcttgaaagcctgccctccggctttgattactggcagatagtccctggacaaggtgactactacaatccggatttcattacgcaaaataatgacactattcaaaaacatggatatcttacgaaccttattactgatgatgctatcgactggatagagaataaacgcaacccggagaagcctttctgtcttttgatacatcacaaggcaattcaccgtaactggctggcagatacttgtaatttggctttgtatgaagataaaaccttcccgttaccggataacttctttgacgattacgaaggtcgtcccgctgccgctgcacaagaaatgagcattgtaaaggatatggacatgatttatgacctcaaaatgctccgtcctgataaaaaatcccgtttgaaatccttgtatgagaaatatatcggtcgtatggatgaagcgcaacgtgccgcatgggacaggttttacactccgattatagatgatttctataaacagaatcttcagggtaaggaacttgccaattggaaattccagcgttatatgcgtgattacatgaagactgtaaaatcactggatgacaatgttggtcgcgtactcgattacttgaaagagaaaggtttactggataacacacttgtagtctacacttccgatcagggattctatatgggcgaacacggttggtttgacaaacgtttcatgtacgaagaatctatgcgtacaccgcttgtcatgcgtctgccgaaaggattcgaccgcagaggtgacatcaccgaaatggttcaaaacattgactatgcacctactttcctcgaactggcgggagcagagataccttccgatattcaaggtgtatctcttgtgcctttgttgaaaggtgaacatccgaaagactggcggaaagctctttactatcatttctatgaatatcctgctgaacacatggtgaaacgtcattacggtgtacgcacagaccgctataaactgattcatttctataatgatatcaactggtgggaactatatgacctgcaagcagatccgtcggaaatgcacaatctctacggacaaccagaatacgaatcggtggtgaaggagttgaaagaagaaatgctgaaacttcaggagcaatacaatgatcctgtccgtttctccccggaacgtgacaaggaataaatccaatgtacatacatcatgaaaaaatatatcttaatcattctcattctgctttcgccattgccggtgtttttgcaggctgataacttaacatccccttttaattcaatagttccacgcccggcacaaattacgccgggtagtggtagctttatcttttctgcaaaaactacatttgcagtagaaaatcaggaacaggccacaattgctcacaactttatcgatttgtttgtccatgctgctgggataacccccatgttaaatgtcgggagcaaggaggggcaagtcattttcgtgacagattcttctttaaaaactgaagcatatctgttaaaggttacgccggaacagatacttattaaagcttcggatacaaagggcttcttttatgcattacaatctatccgccaacttctgcctgctgccatagaatcgggacaaccggtaaagaatgtcgtgtggagtgttccggcagtgacaattcaggatgaacctcgttttggtttccggggattactgttggatccggtacgttgttttattcctaaagaaaatgtactgcggattatcgactgtatggcgatgctgaaaatcaataaacttcattttcatctgacagatgataacggttggcggattgaaatcaagaaatatcctcgtttaacggaagtcggtgcatggagggtagaccgtacggatgtgcctttccactcacgccgtaacccgaaacggggagaaccaacgccgataggcggtttctacacacaggaagatatcagggaaatagtggcttatgccgctgacaggcagattgaagttattcccgagatagatgtaccggcacatagtaatgcggcgcttgctgcatatcctcaacttgcctgtccggtcgtgaaagactttatcggtgtacttcccggattgggaggacggaactcagagattatttattgtgcgggaaacgatagtgtatttacctttctgcaagatattttcgatgaaattctgacacttttcccttcccgctatattcatgttgggggagatgaggcacgaaagacgaactgggaaaaatgcccgctttgtcagaagcggatgaaaaagcagcatttgactaatgaagaagatttacagggctactttatgaagcgtatcagtgattatctgcgtaaaaaaggacgtgaagtgattggttgggacgagttgacaaacagttcttttcttcccgaagagtctattatacttggttggcagggaatgggaacggctgccctgaaagctgccgaaaagggacatcgatttattatgactccggcacgcatcatgtatctgatccgttatcagggacctcaatggtttgaaccggtaacatatttcggaaacaatacactgaaagatgtttttgactacgagcctgtgcagaaggattggaaaccggaatatgaatctttattaatgggcatacaagcttgtatgtggacagaattttgtaataagccggaagacgtggattatctcttgtttcctcgtctggctgctctggcagaagtagcatggacgcccacgggcacaaaagattggtccggtttcttgaaacggatggatatatataatgcacatttggcagaaaaagggattgtttatgcccgttcgatgtataatatccagcaaacagtgacgccggtaaacggacatctggaggtgaatttggaatgtctccgtccggatgtggaaattcgctatacgctgaatggcagtaatccggcgatgtcctcacatcgttatgacggacctatccgtgtgacaaaaacgcaaatggtgaaagccgccacctttatggacggcaagcaaatgggagaaatcctggacttgcagcttacatggaacaaagccacggcaaaaccattgcttggtaataagaaaaatgaaatgttattagtcaacggattgcggggaagcctgaaatatactgatttcgaatggtgtaactggagccggaatgattcaatttctttcaccatagatttgcttggtaaggaaaaattgaataaatttgccattggttgcattacgaattatggaatgggagtgcataaaccgaaaatgattcgtgtggaagtttccgatgataaccggacatactgtgccataggggagttgaacttttctttggaagaaatttataaggaaggaacttttagaaatgattactcgctggatatgggtggcgtatctgcccgttatgtacgtgtgacggcgaaaggagcagggatatgccctaaagatcatgtccgtcccgatcaggaagcaagaatctattttgatgaagtaatgatagaataagagtctagtcgttaaaaataataattatgaacattagcttaaagaaacgaacctttttaatcttattggcaggactgactgctaccttcgcttcggcgcaggaacaaccgttgcccgaatggcagagccagtatgcggtaggactgaataaactcgctcctcatacctatgtatggccttacgccaatgcttccgatattgaaaaaccgggcggatacgaacagtctcctttttatatgaccctgaacggaaaatggaaattccattgggtgaagaatcccgataaccgtccgaaggacttttatcagccttcttattataccggaggttgggcggacatcaatgttcccggcaattgggaacgtcaagggtatggtacagctatctacgtcaacgaaacgtatgagtttgacgacaaaatgttcaactttaagaagaatccgccgttggtcccttatgcagaaaatgaagtcggctcataccgccgcacatttaaagtgcctgccgactggaaaggacgtcgggtagtactttgctgtgaaggtgttatctctttctattacgtatgggtgaacgggaaactgctcggatataaccaaggctcgaaaacgaatgccgaatgggatatcacggatgtcttgaacgatggagagaatgtagtggctttggaggtataccgttggagtgcgggtgcttatctcgaatgccaggatatgtggcgtttgagtggtatcgaacgtgatgtttacttgtacagtactcccaaacagtacattgccgactataaattgaatgcttctttggataaagatagatacaaagacggtatcttcggactggaagtaactgtggaaggaccttcttctactaccggttctattgcgtatacattgaaagatgattcgggtaaagctgtcttgcaggacgctattcaaattaaatcccgcggattaagtaatttcatagcatttgatgaaaagaagattccgaatgtgaaagcctgggatgcggaacatccccacctttatacactcgtgctcgaactgaaagacgaccaaggtaaagtcactgaactgaccggatgtgaagttggtttccgtacctcggaaatcaaggatggacgtttctgtatcaacggcgttccggtattggtaaagggaaccaaccgccacgaacattcgcaactcggacgtacggtaagtaaggaactaatggaactggatatcaaactgatgaaacaacataacatcaaccttgttcggaactcacattatcctacccatccttactggtatcagctttgtgaccgttacggattgtatatgattgatgaagcaaatattgaatctcacggtatgggctacggtcccgcctctcttgccaaagacagtacttggctgacagcccacatggaccgtacacaccggatgtacgaacgttccaagaatcatccggccatagttatctggtcgttaggaaatgaagctggcaacggcattaacttcgaacgtacttatgattggctgaaatctgtagaaaagacccgccccgtgcagtatgaacgtgccgaactgaattataatacggatatttactgccgtatgtaccgtggcgtagacgaaataaaagcgtatgtagcgaagaaagacatttaccgtcctttcatcctttgtgaatacctgcatgcaatgggtaacagttgcggcggcctgaaggaatattgggatgtcttcgaaagcgagcctatggcacaaggcggtaacgtatgggactgggtagaccaatctttccgcgaaatagacaagagcgggaaatggtactggacttacggcggtgattatggtccgcaaggaattcccagtttcggtaatttctgttgtaacggcttggtcggtgccgaccgtgaaccacatccgcatctgctcgaagtgaagaaagtgtatcagaatataaagaccactttacttgaccggaagaacatgaaacttcgtatcaagaactggtacgatttctctaatctgaatgaatatatattccattggaatgtaacaaccgatagtggagagaaactggcagaagggactaaagtgctggattgtgaaccgcacgctaccatagatatacagttgggtaatgtgattctttcgaaaaaggaccgtgaggcttatctgaacgttagctggacccgcaaagaggattccccgatgatagataaagactgggaagtggcttatgaccagtttgtactttccggcaataagaattctacggctcatcgtccgcaaaaagcaggtgaaacaacatttaccgttgataaaaaaacaggagctctgacttcgttgagcctgaacggcaaagagctgttatctactccattgacattaagtcttttccgtccggctacggataatgataaccgtgatagaaacggagcacgtctgtggcgtaaagcaggactggataatattacccagaaagtcctatcactgagagaaggcaaatcctcaacgactgcccgtgttgaaatactcaacgcgaaaggacagaaagttggtacggctgacttcatctatgcactggataagaatggcgcattgaaagtgagcactactttcgaaccggatacagcacttgtgaaatcaatagctcgcctgggggtaacgttccgcgtggctgatatgtatgaccaagtttcctatttgggacgtggtgacaatgaaacgtatgccgaccgtaaccaatccggtagaatcggactgtatcagacaacccccgaacgtatgttccactattatgtcactccgcaatccacgggtaatcgtactgatgtacgatgggcgaagtttacggatcactccggtgcaggtatctttgtcgagtcaaaccgtgctttccagtttagtatcattcctttctcggatgtgttattagagaaagctcgtcatatcaatgacctgaaacgtgatggaatgttgaccgtgcacttggatgcagagcaggctggtgtaggaacagctacttgtggtcctggtgtattgccgcaatatttggttccgttgaagaaacagcactttgaatttaccctttatccggtaaaataagtgttgaaccaataggttattagattatatataataggtgtggattttactggcttttctgaatattgtcagaaatgttctatgaaagtagtgaaattcacacctttatgttatctttgcgctatcagtattaattaaattttatatcatgaacaaactactgaccgcagtattattatcctctgtcataacattgagtgttcaggcacaaaaggcagaagaatattatgtgaagcacgttgaatttcccccgaacgcgactcttgaacagaaagtagatatggcggcgcgcctgatacctactccccaacagttatcctggcaacaaatggaactgaccgcttttctccatttcggtatcaacacttttaccggacgcgaatggggagacggaaaagaagatcctgcacttttcaacccttcggaactggatgccgaacaatgggtgcgcagccttaaagatgccggatttaaaatggtgcttctgacagcgaaacaccacgatggattctgcctttggcctacggccaccaccaaacattccgtagcctcttctccttggaagaacggacaaggagacgttgtgaaagaactccggaaagcctgtgataaatatggaatgaagttcggagtctatctctctccgtgggacagaaacgcggaatgttatggagattctccccgatataatgagttttttatccgccagttgacggaactgctgaccaattacggtgaagtgcacgaagtctggttcgacggtgcgaatggagaaggaccgaacggaaagaaacaagtatatgactgggacgctttctataaaacgattcaacgcctgcaacccaaagctgttatggcaattatgggcgatgatgtgcgttgggtaggaaatgagaaaggactgggacgtgaaacagaatggaatgccactgtgctcactccgggaatttatgcccgttcggcggaaaacaacaagcgcctgggtgtctttagtaaagcggctgacttaggaagccgtaagatgttggagaaggccacggaactgttctggtatccgtcggaagtggatgtgtctatccgtccggggtggttctatcatgaggcggaagatagcaaagtaaagtctttgaaacatctgtcggatatctatttccggtcggtaggctataattccgtgctcttgttgaatattcctcccgatcgtaaaggcttgataagtgaggcggatgtgaatcgtctgaaagaatttgctgcttaccgccaacagatatttgctgacaaccgggtgaaaaaaggaagaaactactggaatgccacttcgggtagtgaagctgtttattccttgaagccgaagtcggaaatcaatgttgtaatgcttcaggaagatataacgaaagggcagagggtagaggcttttaccgttgaggctctgacggataacggttggaaagaagttggtaaaggcacgacaatcggatataagcgtatgctgcgttttccggcggtaaaagccggcaggctgcgggtgaagattgatgaatgtcgtctgactgctcacattaatcaagtggctgcttattatgcgcctcctttgcaggcaaccgttcagagtgaagattggaacaacctgccccgtactggttggaaacaggtcgctgcttcgccgttgacgattgacttgggcaagtcggtgacattgaccagttttacctatgctccattgaaagcggaagcaaaacctacaatggctttccgttataaattctttgtgagtgcggacggcaagaactggaaggaagttcctaccaacggtgagttcagtaatattatgcataacccgttgccgcagaccgttgctttcggtcagaaagtgcaggcacgctatattaagttggaggctactacgcctaccgcaacaaccgcaaaagtggaaatgaatgaaataggagtgaagataaccccctgacggagttgtcatcattgaaagatatgcttagagagtagcagtgaggactggcggtcttgatttctcgtgaatcagacgccagtcttttttttattaaaccaaatgaaccttttactgttattaattaaaaaagacagaagttatgctagtagtagatttaggaaagtggatgaacaaaatcctgatagattggggaatagacccgaaggtagctgatcgttttgatgaaactattattgctttgctgatgatagcgattgctatcggtctgaattatctgtgtcaggcgattcttataggaggaatgaagcaatacacccgtcggaaaccacatctttggaacacgttgttgatgaagcgtaaggtgtttcataatctgattcatacgatcccggcttttctggtttatgctttgctgccaatggcttttgttcgtggcaaggatttattgcttatttcccagaaagcttgtgccgtttacatcatcttttctttgttgttggcagttaatgggattttgctgatgataatggacatttacgatggaaaggagtcgatgaagaaccgcccgatgaagggattcattcaggtgttgcaggtacttttgttctttgtcggaggaattgtaattattgctattatcgtgaataagtctccggccagcctgtttgccggattaggtgcttcggcagctattctgatgttggtgttcaaggattccatattgggttttgtagcaggcattcagctgtctgccaatgatatggttcgtcccggagactggattacgcttccttccggcgcagctaatggtacggtgcaggagattacgttgaatacagtcaaaattcagaacttcgataatacgatctctaccgttccgccttatactctggtcagcagcccctttcagaactggcggggaatggtgcaatcgggaggacgaagggtgatgaagaatataaccctggacttgactaccctccaattctgtacgccggaaatgctcgaccgttatcgaaaagaaatacctttaatggcagattatcaacccgaggcaggagtcgtgcctaccaattcgcaggtttaccgtgtgtatattgaacggtatttgtgtagtttgcctgtggtgaatcaggatttggacttaattatcagtcagaaggaagccacgatgtatggtgtgcctattcaggtatatttcttttcccgcaataaggtctggaaagaatatgaacgtatccagtcagatatcttcgaccatttactggcaatggttcctaagttcgatttgaaggtttatcagtattcggattgaatgattatattctcaaagtattctcaccatgatgagaaaaaaatctcatcatggtgagaattttttctcattacgatgagaattttttctcgctatggtgagaataatcccttgtctgaggtatgctgggatgaggtttatggtcttaattaataaagaatcagattaaaatcgacatagattggcagatgatcgctaatacccccctgatatttcattcctttataggtgcggaaaggttccttatcgccatatttcttatcttcggtcaatagaaaagggaggttggaaacggttgctttgttttcgcttgtggaaaaactgtttgctgggttaagtagagaaccggatacaattaggtgatcgagtaatccccattctccccgatatttgtatgaaccgaaatttttggattgggcttttcgggcaagtaaatggtaaagctttaaaggagaaggagcagttggcgaaggagattctgcttccagtattttctgaatagatttattggtcggatagtcattgaaatctcccataatgataatttgtggatgaagccgtatgttgagaatactgtcagcctctgtgtacagtattcgggctgcatgaaggcggtacggttcggattcttttgctccgccggaacgacttggcaagtggcagacaaatacgtccagtgtgtctccggtcagtagcaaaccactgacgtgcaacaaatctctcgtggggcgaaactgtttcaggggcggaatagagacagaacggaaagacaagagcttgaataaatcccgttgatagagcaatgctacgtcaatgcctcttaaatcgggagagtcggtcatgacatagcggtaattcaattcctttaaaggagaacggcgggtgaggtcgcgaagtaccgtatcattttctacctcacataacccgactaatgccggaggttcccattcgccgacggcagtaatgacacgcgccatatcagtcagctttttcttgtatctggtgtaattccaatgacggagggcatcgggaagaaactcacggtcgtttttcaacgaatcatgatgtatgtcgaataggttttctacattccaacttacaactctgaaacggatttgttgtgcaaaggagagggtgcagaagcccataacaaaaaagattatggccatagctgctctttttctgctacgaccacaatctccttttttatagtggcttatctgtctgttactttttggcaggtacatgtgccagaatatccaacagatgtttccagaatttctctacggtagggataagcatccgttcgtcaggagagtgaactcctgtcaaggtcgggccgaaagaaatcatatcgagcgtcggatacttgtcgaggaacagaccgcattccagtccggcatgaatcgcctttattttggcatctacaccgaatagacgtttgtatgattcggcagccacttctaggatagctgaatgtgggttcggtttccagcccggataaccttcaccgaaggtaacattggctcctgccaattggaaagcggagcggacagtatttgccatatcgtcgcgtgcggacaggatagaactgcgttggctggtttcgatacggatgacattgttcggtttcatcttgacagaagccagattagtagatgtttctaccagtccggggatgtcctggctcatggcataaacaccgtgaggggctgcatacagagctttcagcagacgggcggtggtatcctgatcgatagctgttttacggggagtttccgattcaaggactagtcgcaagtccggttcggtaacggataactcgttttctacttcgctggtgaagatattcagttcggtgcggacgtcatgtttggcgtcttcgggaaccgcgcagattgcgtatgcttcgcgaggaatggcgttgcgcaggttaccaccgttgatttcgcagaggtacaggtcatgtctggtagccatgcgggtgaggaagcggttcagtattttgttggcattgcctcgtccgaggtggatgtcaccaccggaatgtcctcctttcaatcctttcacttctactttgaagaagaaatatccggcgggaacttcaacctctttataagtaaactctgcaacggaatcgatacctccggcgcatccgataaagatctctccttcatcttccgagtcgagattaagcaggatgtcaccactcatgaaaccttctttcagggcgaaagctccagtgagtccggtttcctcgtctacggtaaacaggcattccagcggaccgtgctcaatgctatcgtcggccagaatagccagttcggtggctacgccgataccgttgtcggctccaagggtggtacctttcgctttcaaccattcaccgtcaatttctgtttcaatggggtcggtgaggaagtcgtgttgaacgtcgttgttcttttcacacaccatgtcgatatgcgattgcagtacgacagtttgcaggttttcttttcccggagtagcgggtttcttgataagtacgttaccggcttcgtccactttggtttccaggttatgttttgctccgaatgccttcaggtaggcaatcattttttcttccttcttcgaagggcggggcacctggcagatttcttcgaaatacttgaatacgccggccggcttcaaatcttttttttccatgctgtttctattttataataggaatagaagagtggttttggcttcttctattgctaaatatggttaatttgattggcttatctgaactcatatctcattaaagcctatctttgcactcacaaaattaatagaaatggttgagactatactgataactttgttaatagttgctatttccctggtattattaggggtgaaagtattctttacgaagggagggaagttcccgaacggtcatgtgagtgggaataaagcgctgcgtaagaaagggattgggtgtgcacagtctcaagatcgcgaagcacagaagaagccacgtttttctattgatgagttggaaaaagccttgaacgatagtatgaattaaattattaaaaacaatacacttattaaattatgaatagaatgaactacctcatgaacggtttggctgctcttgcgtttattgttttattttcacaatgtgccggcaaaactgacaatcaaacttcaacaactccggctcaggtgaatgccgaactgtcaggaatgaaaatcgcctatgttgaaatagattcgctattagctaaatataacttctgtattgacttgaatgaggcaatggtgaagaagagcgaaaatgttcgtatgacactgaatcagaaagctactgctttgaataaggaaaaacaagacttccagaagaagtatgaaaacggtgctttcctgtcacaggatagagctcaacaagaatacaatcgtttggctaagatggaacaagacttgcaagagttgagtaacaaacttcaaaacggtttaatggaagaaaacaataagaacagtttgctgttccgtgattctatcaatgctttcttgaaagaatataataagacacatggatatagcttgattttcagtaatacaggttttgataatctgctttatgctgatagcgcgttcaatatcacaaaagaaatcgtagacgggttgaatgcaagatattcacctgctgctaataagtaactttttttagcttttctcttataaaagagatttcattgtttatattagaaatatgtaaattataatgttcctgttctaggctgtgaagttttggacaggtttttttatgccctttccttttcttcttcctgtggaatacggaaggcggtgtagagttcgagtatggcagcaatagtgaggcaggcaatccattcattgcctcgtgtggtaaacatgaaagcaccagtcagtataagagcgagtgctccgaatatctgctgaacacggagacgtttcagtgtcttgcttttcccttttaccggggtgtttacttgtgccagtgcaatgaatccggctccaatagtatatatgtagggtgcataaatccagcctgtaatgaatacggctgctcctgtgagggccattacggcgcctacgccaaagagggcgggtactagttgcttcattctttaatcttcaaaaacgtaaatatcttcattgggtttcttcatcagatacttttcgcgggcgatctgttcgatagcatccggattggtacttatttcattaaggcgcttggtattctcttcgtaatccgcccggtacttttctatttcttctttcaactggctgatctcccgttcgtatccaagacggcgaagcaggctgttttcatccaaaaaaacgataatgacagcaaatgcgacgatagtgataagatacttgcgtcggcatataaattcccagatactgattagtttacccataattaatctttttaatctccgcaaagataaaactaataacttaaaaacttatcgcttctgcttcaaaacttctctctctatcccttattacttatcacttttttgtgtacatttgcaagcaaagcaaaaatagagaaaatcccggatatggaaaactatattgtatcggcccgtaaataccgtccctccacgttcgaatcggtggtaggacagcgggcgctgaccactacgctaaaaaatgcaattgctactcagaaacttgctcatgcgtatttattttgcggaccgcgtggggtaggaaagactacttgtgcacgtatcttcgccaaaacaatcaactgcatgacacctactgccgacggtgaagcttgcaaccagtgtgaatcttgtgttgccttcaacgagcagcggtcgtataatatccatgagcttgatgcagcctccaacaactcggtggacgatattcgtcagctggtggagcaggtgcgtattccgccacagattggcaagtataaggtttatatcatcgacgaggtacacatgctttcggcttctgcattcaatgcgtttctgaaaacgctggaagaacctccccgtcatgctattttcatcttggccacgacggagaagcataaaattcttccgaccattctttcccgttgtcagatttatgatttcaatcgtatcagtgtggaagatacggtgaatcatctttcgtatgttgcttcgaaagaaggaatctcagcagagccggaagcactgaacgtgattgccatgaaagcagatggaggtatgcgcgacgcattgtctatcttcgaccaagtggtgagttttaccggaggaaatatcacgtataaaagcgtgattgacaacctgaatgtacttgattacgaatattatttccgtttgacggattgctttcttgccaataaagtgagtgatgcgttgttgcttttcaacgatgtgttgaataagggattcgatggaagtcactttataaccggattgtcttctcactttcgcgatttgttggtaggcaaagatccggtaacacttcctttgcttgaggtgggagcgagtatccgccaacgttatcaggaacaggcgcagaaatgcccgttgcctttcttgtataaggcgatgaagctctgtaacgaatgtgatttgaattaccgcatcagcaagaacaagcgtttgctggtggaactgaccttgatacaggttgcgcagcttaccaccgagggggatgatgtgagtggtgggcgtagccctaaacagactataaaacccgtgttctcacaacctgccgccgctcagccgtcgcaggtagcttccgcttcatctgtacagcaggctcctgttcattcgtcaccggcttcggttactgctaatgtcactcccaacaggcagccgcagatggctacgacggcaaggcctgtatcgccttctgctacgaatacgacttcatccgctcctttgccgggcgcaggaattccttcggttgccaaagaggaacgaaaggttccggtgatgaagatgtccagcctgggcgtatctatcaagaatccgcagcgtgatcaggccgcgcagaatgcaactgtagctcatgttcccagagtgcagcaaccggaacaagactctaacttcaatgaacgggatttgaattattattggcaggagtatgcaggtcagttgccgaaagagcaggtggctatcgcaaaacgcatgcaggtgcttcgtccggtgttgctcaataactctaccacttttgaaattgtagtggataatgagattgctgcaaaggactttacggcattgattcctgagttgcaggattatctccgtggccggttgaagaatagtaaagtggtgatgacggtacgggtaagtgcaccgacagaaacggttcgtgcagtaggtcgtgtggagaagttccagatgatgtctcaaaagaatcaggcattgatgcagttgaaagaagaattcggattggaactgtattagtttcgggtaagaaattcccgcttcctttttctgcaagacaagaatagaaatgacaaacgccggcagacttgcagtgttctcactcaagtctgccgacgtttatttttagtgtaatcggttgttcatacggtcctcatatccatctcccggtcttctttccggcattacgatccataggatgatatatatgatgattccggcaaaagcggtgaagattgttgctaatacatagacgattcttaatagggtgggatcccagccgaaataatcggcgattccggcacatacccctgcaaccattcggttaccggcggaagctctggttaattttttgttattttccataatatactgtttttgtataagaaaaaagctccgaatattactactcgaagctttcatcaattactcttattgttgggggtggaagaccggactcgaaccggcgacattcagaaccacaatctgacgctctaaccaactgaactacatccaccatgtctgcgtttctctaacgcggtgcaaagatagatattatctttaaatctccaaagaattctattacttttttttataaaaagtgtattcttttattccccgattgtgcttgctgaaaagggatcgcgcatcattcgtgaagattttcaacgagttacgggcttttaaaggaactaactctatcggtaagtttaccggaagtaattggtgattttttttctcagattgaaccggtcgtgctgtccatactaagctatactcgcagttgttgaggcggacggtactatcctttaccagttccatttttaccatgagtccgccgtcggtacggcgggcggacatattggaaatataatttcccaaagaatatacgacaagatgtttgtcatttgtcaggctatccgtacggacttcaattggttggacaacgtgcggatgtgaaccaatgacatggtctactcctttttgaagaagccagccggcaaggaacttttgctctttatcaggaagggattgatattcgattccccaatgcatacaggcgataatggcatccggatgcagtgtcttgctcacttcgatgtctttggcgataatagccgtatcaatatagttcacgatattgggaggagtaacggcgattccgttggttccatacgtatagttgagcagggcgatacgaaatccgttcttttctaacaggagcggatatttcttttcgcgttcttcggcattggtgtacgtaccggcatgagggatattcagcgagtcgatcagaagaatagtacgttccaatcctggtcttccacggtcgagactgtggttgttggctgtcaccagtacgttgaaaccggcgtcgtgaatggcggtgaggaattcgtcgggtgcgctgaaagcaggataacctttatagggctttccacccaaagtaacttccagattggctatggcaagatctacactcccaatttcttctttcacgtattcaaagcaagcggagtaatcataagtccctgttgcggtacgcgcagcattgatctgtccttgatgttgcatgagatcgcctacgaaaagaagccgtaaggtgtcggcagacatgatgctgtcgggtgtcgacagagtatcagataaggtattaatagaatctctccttgcctgcgaccgggaggtgcaggacagggagagaaataaaatcatcagaaacagtgcatgtctcattgataaatggctttcttaccggctaaaagtgtatttttcattaacgatactatcgtcatcggaccaacgccacccggtacgggggtgatgtaagagcattttggcgctacttcgtcgaacttcacgtcaccggtcagcttgaatccggatttcttggttgcatccggcacgcgggtagtacctacatcaattacgactgcaccttcttttaccatttcagccttcacaaagttgggctgtcccaaagcggcaatgataatgtcggcttcctgacattcttttatcaggtctttgctgcggctgtgacatacggtgacggttgcgtctcccggataagccttctgcatcatcagggcagccataggtttgccgacgatattgcttcggccgagtacgacacatttcttgcccgaagtctcaattttgtaacgcttcagtagttcgaggataccgttgggagtggcagatacataacacggaagtccgatagacatacgtcctacattaatagggtggaatccgtctacgtccttacggtaatcaatcgtttcgataactttctgttcggagatatgtttcggtaacgggagttggacgatgaatccgtctacgtcactgtcttcattcagttcacgtactttggcaagcagttcttcttcggtcacgtcgctttcgtagcggatgagggaagatttgaacccacaaacttcgcaggcttttactttggcggctacataagtttcgctgccaccgtcgtgtcccacaaggatagctgccaggtggggacgtttaccgccctgagccacaatttcggctacttcggctgcaatctcttgttttacttgttcggaaatggcttttccgtctatcagagtcatattttcagagtatttattggtgataggcaaaagtaaaataaataactgaactctccaaaaggattgttgtttttgtcgggatacaaaaaaaacagaggctctatttaggtgaaacagagcctctgtttaccccaaatagagcctccgtttgatgcaaatagagcctctgttcggaaacaggctaaaaaggactttttcctgattagatttccatattcttattcgttaatagctgtcctttgtactctccggtcagtgtgcggaggaaggctacaatcttatctacttcctgttgtggcaaatcgatgcccaactggtatttagccattgcacggactgcgtcatccatagtagccatgctgccgtcgtggaaatatggagcggtcagttcgatattcctcagaccgggcactttgaagcggtggcggtcacgttctatttgagtctgtttgaagcggccgttgtcttcttcagtcatttctgcctgtcgatcggcaaagtaatcgtgctgtacacctatcagttcataagatttccctcccaggatttctcctacatggcaggttgcgcaatcatacttcttgaaaagttcgtatccggcgatttcgttttcggtgattgcatctttttgtcctttcagatagcggtcgaagcgtgagttgggagtcaacaaagtcttttcaaactcctgaatggcgtctgtgatattcttctcgctcaatccgtcggcatacacttcgttgaatgcggatacgaaatctttgtcttcagccagtttatcgataatctgatcgaatgattcgcaagccatttccaccggattcaacggaggaccggcagcttgttcggcaagagttccggcacggccatcccagaattgaacgaaattgtatgcggcgttgtatactgtcggggcattgacgccaccaaactgtccgcctacaccttcggaatattgtttgttgtccacgccgcctgtatccaacccgtggcaactggcacatgatacggtattgtcagcagataaacgtgtgtcatgatacaacaaattacccagaacgactttgcgtacatccactgcgatagaatcggcaatgggacgaatgggttcgttggcaaattccggtgctactgtaatgtccgtatacattcccatacggtgactttttacccagttcagtgcgacttccttttttgcgtcattgaaggaagccccccaatgcacaaggtaatattttgcctggggcatttttccgtcgaggatcactttttctattttggccaggtctgccggattgaggggctgtcctgcttccagatctgcctccatttgggtcatgtcgaaggcacggtatgccttgctgacgtcttccattacaatttttccggccacaggcatgcttgcatagaacggtaggtccggtgttgaggtatgacatctcaaacatcctgcatccgtaataatctgctgcatctgcgcatttgcttccagatcggcagaaggtacgcggtgcataagtcgataagtgactgctaatgccgctaccactaccaacagtgccacaattagttttgtacttttcttcatttcacatttgtttttttagattagttattacgattatataagtgtacgctttgttgagccgccggtaaataatttactccgtaccagcacatctgcaaagccaggaaggacatgatgagcaacacataaagcgttttccgtcccgttttccgaaaaagacggaggtgtacgtaaagtaaataccctgtccaagtgatgactgcccaagtctctttcggatcccagctccaatagtttccccatgcttcttttgcccaaagggaacctagcagcataccaatggagaggaatgctattcccgcataaaccaaattgtcggctgtgtgcaagtattcttccttatggcggaacaacccggtcaatgcgattataaaagcacagcccaatacagagtaagaaaacatatatacggtgacatggggaatgaaccatatgctttgcagagccggcattagtgactggtcgtgtatctcgggtttcatcagattgataatgacaaagactgtggcgagcagtgccgagaaagaaagaatccaacgatactgccatctgatataagtcagtagtccggctatgcccatgaagaaagagtaccacaaacgggtttcccccatagtgcgtaacggaggacgttgcaggaagagccataatccggtaatgaatacggccagaacgataattccacctgacgtaaaaccgattgctgtcttacttctcgttgacgagcgaagggcaaatactgctcctatcagccataagcagatagatactgctgcaaatacatagaaattatcccagtttatcatctgttttaggtccgttaatgaatagaagaatagctcccgcaagcatcatcaggatacctgctactattatatatttccagggttgctttactacctgcaagatgcagtactcactctcgttgcctttcgttacgtcatagccggtgaggtaaatatcttctcccaaccgataggcgtatgggtgattgacctcaagcaatgctttttcatttcccagacgtacattggcagcaaagcgggaaggacgcccgttcgggtagtattctacggcaaaagagttgagttcgatttcataatccaaataatgcgatgcaccgttcatgtcgaatgcttcgcgtgatggctcacctttatatataggtatacgtaaagtctgtgtgtcactgcttcctagaaaaccggcaaatagagccagccatagccctgcgtgattcaggatgaatctccaacgtgcctgtttgcggtaatgataggcgtgaatggtaatcattgccaggttacttaataagaacagaagtatggcgatgaatatccaggaagtcataaagttatagcaacctaaaaaggctggaagcccttcacgcatttttgcttccgcatcggatagttgagggaaaagacctattatcaggcaaccgcagatgagtaatccgatagataggatacttgcttgggaagaatagaggaatcgggtaaattttgcaattttatattccttatacaacatccataacaagaaaagccatagcgccgcaaaaataagattgagcggaaaggcgaaaaaggaaaccggaaaatttcccgtaagtagttgcatcgcaactgccagtgaaatatataccattacgtagacgtagtgcatattcgtgcttttgttctgttattttttgcaaagtaaacaaataaaaatgaatatacatataaaatctatgtaaaattgtaatcattacaattgaatgacagagctgatgtgattataaggagaaaatcacataaagtagatgtaggaaaggagaggaggggtttaaaaaaataaagaaaggaagccggaagcttcctttctttattagaatttgaaacgaaatcttttatttcttcatcttaggcatcatcttacccattttgctgctggttaccattttcatcattttacgagtctggtcgaattgtttcaacaggcggtttacttcctgaatcgttgtaccgctacctttcgcgatacgtgtgcggcgtgaaccgttcaggatttccgggttggaacgctctgccggagtcatggagtagatgatagcttcgatactcttgaaagcattgtcatcgatatcaatgtctttgattgcttttcctactcccggaatcatggaagcaaggtctttcaaattacccattttcttgatttgtgcaatctggctgaggaagtcgttgaagtcgaattgattcttggcaatcttcttctgtaaacgtttagcttcttcttcgtcgtattgttcctgcgcacgttctaccaacgaaacgatatcacccataccgaggatacggtctgccatacgggcagggtggaactggtcgatcgcgtccaacttttcgcctgtacctacaaacttaatcggcttgttgactaccgaacggatagaaagcgccgcaccaccacgggtatcaccgtcgagcttggtcagtaccacaccgttgaagtccagacgttcattaaattctttggccgtattcacagcgtcctgtccggtcatggaatcaaccacaaacagaatttcgttcggattgattgcttccttgatagcggcaatctcgttcatcatctgttcgtctactgccagacgtccggctgtatcgacgattacgaggtcgtatcctttggctttagcttcctggatagcgtgttgcgcgatttctaccgggttcttgctttccagttcgcagtacatcggtacgtcaatttgctctgccaacacacgcaactgttcgatagctgccggacggtaaacgtcacaagctaccagtaatggcttgcggttcttcttggttttcagcatccgggccagcttaccggagaaggtagtcttaccggaaccttgcaaacctgacatcaggattactgccgggcgggcatcaatatcaacttcgacagtctcgccacccattaactgggtcagttcgtcgtgcacgattttcaccatcaactggcttggtttcactgctgtaagtacgttctgtccaagagctttttctttcacggtatctgtgaaattctttgctaccttgtagtttacatcggcatcaagaagtgccttgcgtacatctttcagcgtttccgccacgttaatttcggtgattttgccttcacctttcagaatcttgaatgaccgttctagtctttcacttaaattatcgaacatagttatttaattacgaattaatattttgagcctgcaaagttactacaaaaaagtgaaatgcggaagaatatggtaatggatttgatttacaggggtttcattaacgctgccaattattctgagagccattacaatccacgccgaagccaaatcaagacggagctacgttacttgttcgtaaccacgcccaataggtgacgaaatggacacgaataacgaaacaaggccttaaggattagtgagttactgacaactcacgcaaaaaatccggtaacaaaaaaagattgcgccgttcttccgcgatttgcgtatcagaggagggctcttcaccaactaattttgaacaaaaaaaattaaggacgatgaagagtacattttcagttatttactacctcaaacgtcaggtagtgaaaaaagacgggacggttcccgtcatgggacgcatcacggtggacggcagccagacgcaattcagttgcaaactgaccatcgatcccaagttgtgggacaccaaagggggacgtgtcacgggcagaagcacggcggcactcgaaacgaaccgcatgcttgacaagatgcgggtgcgcatcaacaagcactatcaggaaatcatggagcgtgacaacttcgtcacggcagagaaggtgaagaacgcctttctcggactggaacaccgctatcacacgctgatgcaggtgttccagcaacacaacgaggactatgccaagcaggtggaagcaggcatgaaagccaaaggcacactcttgaagtacaagaccgtttacaagcacctgcaagagtttctcaacatccgttaccacgtgaaggacatcgcgttgaaagagcttacccccgctttcatttccgacttcgagatgtttctgcgcacggacaaacactgctgcaccaataccgtgtggctgtatgtatgcccacttcggacgatggtgttcatcgccatcaacaacgaatggctcacacgcgacccgttcagggagtatgaaatcaagaaggaggaaacgacacgcagtttcctgaccaaagacgaaatccgcctgctgatggaaggtaaactgaagaacgccaaacaggaactataccgcgacctctacctgttctgcgccttcacgggcttgtcattcgccgatatgcgcaatttgacggaagagaacatccgcacctacttcgatgaacacgagtggataaacatcaaccgccagaagacgggcgtggtgtctaacatccgcctgcttgacattgcgaaacaaatcatcgacaaataccgcgggctgtgcgaaaacggcaggattttccctgttccccactacaacacgtgcctcgccgggatccgtgccgtcgccaagcgttgcggcatcaccaagcatatcacgtggcatcagagccgccatacggcagccacgacggtgttcctctccaacggtgtacccatcgaaacagtcagttccatgctgggacacaagagtataaagacaacgcagatatacgcgaagataaccaaagagaagctcaaccaagacatggagaaccttgccgcaagattgaaccaaatcgaggaatttgcaggatgtaccatctaaaacagagacgccatgaaacgtgacataatcattatagaggacaagacggtcagcgtaaccggtaacgaggtatggatgaccgccggggaaatcgccgaagagttccatgccaccgtcccggcagtgaacgccgccatcaaagccgtccgcaagtcggacgtgctgaacgactacgaggtatgccgctacatacagcttgaaaacggcctgtacgcggatgtttactcgcttgaaatcatcattccagtagccttccggctgaacacctactatacacacgtgttccgcatgtggctggtggagaaggcactctcaaaggaaaagaggcaggcatacgtgatgttcatacagaacgggaaaaccggatattgctgaacacgcatacagacaacgaaaaaggaaacggacaacaccatcgggtgctgtccgtttccttttttttcatgcaaccgccttattccagcggcttgaggtaattcgcctccaacagttcacgcagtcccgattcgggataaagcaccttacctgccagaaggataaagggcagcatcctgttgttgcgatactcctgcaaggtgcggcggcttacccggagcatttccgccacctccctgtccgtcaggtaatgttccccgtccagtggcggacggtaactttccaaaaatgcggagagccatttggagcctttgagcatattctgtatcgcggtggcaaccggctcgtcctccattgagaaaacctcgttgttctcgttcatcataacatcggattaagtggttaataaaaacagagtcattttccatcgggatagatcgtgccgataagcggaataagccgcctgacctcctccggcctgtaatagaacctgcggttcatctgcgagtagccgataagccgcctgtcacgcaatgactgcaacgtgcgcgggctgattctcaactgcccgcagacctcctcgcccgtgagccacctttccagccgcccgccgtcgcttttgcgcctgagggcggcgactttctccgagagggcgttgaatgacgccagcatcatctcgaaggtctttttctcgatagatacgatttccatataccaaaacatttaatgatttaccgcaaaggtaacgcagccgccttgaatgcgtgccgttttccgctatacggcagcttgttgcgccggttgtccgggttacggagtcactttcaaagaaaatcttacgtgagtcacgtaatgagttgttaaagccccttttgtttattgccgaattttgccgcagagaaacaaaagaaaggacaaaatatgaaagtgataacgattgaaagttccgccttcaccgccctgacggaacagatagccgagatagcggtctatgtgcgtgccgtttccggtgagaggaagggagagtcttccgacatgctgctcaccacccgcgaggcggcgcacctgctgaacgtgagtacccgtaccctccaacgtatgcgcagcgaacagcgcatcggctatatcgtgctgcgcggcaaatgccgctaccgccggtcggaaatagaccgcctgctcgcagactgcaccgtggcagaagatgcagcgacactgacggaactgaaacgcaaccacacgctgcgcacgggcggcggcaaacccaaaggaaggaggacataagatatggaactgcttacacgaaacaattttgaggactggatgcagaagctgatggaacggctcgaccgtcaggacgagctgctgctctccctgcgaccgtccggcaaagccccaaacccgatggaaagtatcaggatgttcgacaaccaagacctctgcatgctgctccagataagcaagcgtaccctgcagcgctaccgcagcatcggtgcattgccgtacaagacgctcggcaaaaagacctattacagcgaggaggacgtactgacattcctctccgaacacgtaaaggatttccgcaaggaagatatagccttctacaaggcgcgtatccataatttctttaataaataacccattaaaacatttttcaaatggcaaagaaaacaacagaaaaagacgtgctgatagtccgcgacgagaagacgggcgagattagcgtggtagccgggcttaacgccgacggctcacccaagcgtacccccgcaaaggcggagaacgcgcagagtttcctgcaattcgacaggcacggagacgtgctggacaacttctttaaaaacttcttccggcagtgcaaggaacccagccgcttcggtttctaccgtgtcgcggcggaccaagccgacaagctgctggaagttatcaaggacttgctgaaagaccccgagggcaacaaggagatgcttgcgccccacaaggtggacacctccggctacgaaaagaaagtacaggaggagcagtccgccgaaaagcaggaacaaccgggacagaaacaagatgacgaacctaaaaaacaggaagaaatggaacagaaaaacgaacagaattaggaaaacccgcagcaggcgcagagcaaccggggctaccaacccatcgacgagagcaagatcaactggaaggagttggaggagaaatggggcgtgaagcgcgacgaccttgaaaagtcgggcaaccttgacaggatgctcaactacggcaagtccgacttggtgagggtgtcgcccaatttcggcggagaagctttcgagctggatgcccgcctctccttcaagaaggacggcgagggcaacgtcagccttgtgccgcacttcatccgcaaggagcagaaactcgacgagtacaaggaacacaagttctccgacgacgaccggaagaacctgcgcgaaacgggcaacctcggcagggttgtggacctcgtggacagggaaacgggcgagatcatcccctcgttcgtcagcatcgaccgcaagacgaacgaaatcacggatgtcccggcaaacaaggtgcgcataccggagcgcatcggcaagacggaaatcaccaagcaggagcaggacatgctgcgtgccgggctgcctgtgcgcgacaaactcatcgaacgcaaggacggcaggaagttcgtcaccaccctgcaagtgaacgtggagcagcgcggcgtggagttcgtgccgggaaccggcaggtcgccacgtgccgcacaagcacaggaagccaagaacaaccccgcacagggacaggcgcagggtacggaaaatacagccaacacgaacaaggagcaacgccgcaacacgtggacgaacgccgacggcagcatccgccccatcagcaaatggagcggcgtggacttcaccgagcagcagaaagccgactacgtggctggcaaagccgtgaaactggagaacgtgaccgacaagcagggcttccacgccacgatgtacatcaggttcaacccggagaagggacgcccgtaccgctacgacaccaaccccgacaacgcgcagaagatcgcgccttccaacgagagccgcacgcaggtggcggtgaacagcgagggcaagaccaacgaggctaccaagaacctgaaggagccgttgcggaagggacagaccgccccgaaggacaccgcacagcaacagcagcaggagaagccgcaaaagaaaaacaataagggcatgaagatgtaatccggtgtccgccactaaatccgaagtaacatttgtaaaattcaaaacgacagaaaaatatgaagacaatcattgcagaaaagccgtctgtggcacgtgagatcgcccgtatcgtgggcgcgacaaagagagaggaaggatatttcgagggaggcggctacgccgtgacatgggcattcgggcacctcgtccagcttgccatgcccgacggttacggcatacgcggctttgtccgtgacaacctgcccgtcatccccgactccttcacgctcataccccgtcaggtaaaggctgagaagggctacaaacccgacagcggcgtagtggcacaaataaaaaccataacccgcctgttcaatgacagtgagcaaatcatcgtggcgaccgatgccggtcgcgagggcgaacttatcttccgatacctctaccattacataggatgcgccacccctttcgtgcgcctctggataagctcgcttaccgacaaggccatccgcgatggactgcgcaacctcgaagcggggagcaagtatgacaacctctacctcgccgccaaagcgcggagcgaatccgactggctcgtgggcatcaatggcacgcaggctctctccatcgccgccggacacggcacgtattccgtcgggcgggtgcagacacccacgttggcgatggtgtgcgcacgctattgggagaaccgccgctttacccccgaagccttctggcagctccatatcgcaacggacggctgcgatgaaggaacggtgaagttttcctcttccgaaaaatggaaagagaaagagtccgcgacggaactgtataataaggtgaagtcggcaggcacagccaccgtcacgaaagccgaacgcaaggagaagacggaggaaacaccgctcctgtacgacctgaccacgctccagaaggaagccaacgccaagcatggcttcacggcggaacagacgcttgaaatcgcgcagaagctctacgagaagaagctcatcacctatccgcgaaccggaagccgctacattcccgaagacgtgttcgcggaaatccccaagctgcttgccttcatcggcagcctgcccgaatggaagggcaagttgcagccgaaagccgtgccgacacgccgcagcctggacggcggcaaggtgacagaccaccatgccctgctcgtcacgggcgagaagccgctgttcctctccaaagaggacagcaccgtctatcacatgatagccgggcgcatgcttgaggctttctccgaaaaatgcgtcaaggacactgccaccgtcacggcagagtgtgccggagtggagttcgtggcaaaaggcagcatcatcaggcaagccggatggcgtgccgtctatggcaaggagaatggagaagagaacaacagccaagaggaaaccgccgccattccctgttggcaggaaggcgacacgctggcactgaaagccgcctccatcacggagggaaagaccaaacccaagccgctgcataccgaagccaccctgctgtccgcgatggaaacgactggcaaggagatagaggacgacgcattgcggcaggctatgaaggattgcggcatcggcacgcccgccacccgtgcgtccatcatcgaaacgcttttcaagcgcggctatatggaacgctgcaagaagtcgcttgtccccaccgaaaaagggcttgccctctactcggtcgtgaaggcgatgcgtattgccgatgtcgccatgacgggcgaatgggaaaaggaattggcacgcatcgagcgtggggaactgcccgccgatgacttccgcaggaagattgaggcatatacacgggaaattacctccgaactgctgtcgtgcgacaagctgttcgcccgcagggattccggctgcaagtgtcccaagtgcggagcggggacgatgcagttttacggcaaggtcgtccgctgcgacaacgcggagtgcggtctgcccgtgttccgcctgaaagcaaaccgcaccctctctgatgatgaaatcaaaaacctgctcaccgacggacacacgaaactgctcaaaggattcaagagcaagcagggcaagagttttgatgccgtagtcgcctttgacggggactataacacggttttcgtgttcccagaaaggaaaagtaaagcgacctctgcgaaaagaagaaaataaatgtttaactttgccactggttcagagtaatgaattgttcttcgataccggattacactcatactttggatttagtggtggcactcggagggataccgggtgcctttttcttctcgttttccaacgattatccctatcatcattatcaatccactaaattccaaagaaatgaacaacaagaagaaaaacgagggtcggaccgacttttcctattacggtctgtacctgctggactacctcaccacgaacaagttcgaacaggcagccgatgaagccttcatccgagaaagaaccgaccgtgccgccgaagcgtatgaacgggcaaggctcgaaggctatcctgccgacggggcgcaggaactggcgatgaaggtgctgacggagggccttcgctactccaggcacgccatcctgcgcgaagtcgtggagaacgaatttgcgggtgaagtaccgggagaaaaatgtgaagcctttacccagaagctgctaccgcttgtcggaaacgtattctccatctatgacctctcggacgacaatttcgccctgtcgcccgaatatgacctgctctacacggagctgacgggagccgtcatcctctatatcgaagagtatggcgtttaaccgcaaacagaggctgagggacaacatcgaggcgatacggacggcattcctccttgacagggaacagcgcacacccaccgcacgcgaacggctcttgttagagcgttattgcggtttcgggggactgaagagcatactcaaccctgcaagggaactgacggatgccgtccactgggcgaagtccgacctcgaactgtttgcccctaccgtggaactgcacaggttgctgcgggagaacacaaaagacgagacggagtacaaacggtatatggatgccatgaagcagtccgtgctgaccgccttctataccccgccggagataaccgggaccatcgcggacgtgctgcatgaacacggcatccgtcccgaccgggtgctggagccgtcggcaggtgtcggtgcattcgtggacgccgtgctggagaacagaccggacgcggacatcatggcttttgagaaagacctgatgacgggcaagatactgaagcacctgcatcccggacagaaagtaagggtacagggcttcgagaagatagaaaagccgttcatgaaccattttgatttggctgtctccaatataccgtttggcgatgtggcggtgttcgacccggaattttcgggcagcaaggatcctgcaaggcactcggcggcacggacgatacacaattactttttcctgaaaagccttgacgcggtgcgtgaaggcggaatcgtggcgttcatcacctcgcagggggtactggatgccccgaccaacgcgcccatacgcgagtatatgatgaaccataccaatctggtgggcgtagcccgcctgccgaacaacctctttacggataacgcgggaacggaggtgggcagcgacctgattatcttgcaaaagaacagcggaaagaatggtgaactgtattacaacgaaaaactcttcgtgcagaccgaacagacccctatcggcacttccgtaaatgggtatgtatggagcatcggctcgctttcacacacggatttgatcagaagtaccgacccgtacgggaaaccagcctataaactcctgcaccgtggggacatcgcacaactggcggaagacttgcgggagcatctgaaaatagaactgcaacaacttgacaggaaactgtatgagaaacacagcctgcatccgacaaaggaggaaagcacggctgcggaagtgcaacctgctccgaaaacagaaaaggtatcaccttctgtaatagcccccgtttctgtaattgagcctgtcaagggagtggagaagccgcaggcacagcccatagaggaaaagccggagattgagccgcgccaacccaaccattcgtcagccgtgcagcttaccctgctcgacctttggggtatgcccatagaggaaccggcaaaaaagaaaaaggcagcgaaaaaggaaagcaagccgaagcctatgccgtccacgcctaaaccgcaggtcaaagttactccacccgttgaagccgccaagccggtaaacggtaataaggaagaaaagccggaaaatgccgaaaagccaaacgacccggacgacatttacgccactctggattgggaaaccaatcctcccatcaacggcttctatgagacaatgatgagtctgacagcggaacggcgcaaggccctacggcttgaggcagaacggcacaggcaggaacaactgaaaaagatgggtatcaaagacacgttgaaccctgcttttgcgccttcttcggacaatatggataaaaagccggaacaaacggaagaaataaagcaacctgaaacaccggcagaagttgtgcctacttccgaaacggttgccacttccctgttcccggaatttgaaacggaaaagccgaaaaaagaagccctcgaccttacgccgcgtccctatcaccgcacgccggaaatgcacctgcgtgaagggtcgctggtggcaaacagggcacgcgacatcggttatctgaaggacattactccctacggtgcaaccttccagccgcttggactaaccggttatcagaaagagaaagcgttgctgtatgtatcgctccgtgacgcatacgagcggttgtaccgctatgaatcgaacagacgtgaggaaaatgtaccttggcgtgaacacctgaacacctgttacgacgagtttgtcatgcgttatggcaacctcaacgccaaacagaacgtgaaactggtgatgatggacgccggagggcgcgacatcctttcgctggaacgtgcggaggacggcaagttcgtcaaagcggacatcttcgaccgtcccgtttccttctcggtggagaaccatgccaacgtcggttctccggaagaagccttgtctgcatcgctcaacaagtatggtacggtcaatctcaactatatgcgggggataacagacagtacggaagaggagcttctcaatgccctcaaggggcgtatcttctacaatccgctcgtaaccggttacgagattaaagaccgcttcatcgcgggaaacgtgatagagaaggcggagcgtatagaggcatggatggaaaataatctggaaagcaaaagattgccggaagtgaaacaggctttggaggctttgaaggaagccgagccgcagcgtatcgcctttgaagacctcgacttcaacttcggtgaacgctggattcccacgggcgtgtatgccgcctacatgagccatcttttcgacacggacgtgaaaatcgcctattccgccagcatggacgagttttccgtggcgtgcggctaccgcaccatgaagatcacggacgagtttctggtaaagggctattaccggaactatgacggtatgcacctgttgaaacacgctttgcacaacacctgtcccgacatgatgaaaagtattggcaaagatgagaacggcaacgacatcaaggtgcgtgacagcgagggcatacagctcgccaacgccaagattgacgaaatccgcaacgggttctcggaatggttggaagagcagtcgccgcagttcaaggaacggctcgtgacaatgtataaccgcaagttcaactgtttcgtgcgcccgaagtatgacggttcgcaccagacgtttcccgacctcaatctgaaaggattggcaagccggggtattcaaagcgtttatccgtcgcagaaggattgcgtctggatgataaaacagaatggcggcggaatatgcgaccatgaagtcggaacaggtaaaacactgataatgtgtattgcagcgcatgaaatgaagcgtctgaacttggcgcacaagccgatgattattggtctgaaagccaatgtcgcggagattgccgccacttatcaagctgcctatccgaatgcccgcatcctctacgcttcggaaaaggatttctcgaccgccaaccgtgtgcgtttcttcaacaacatcaaaaacaatgactatgattgcgtcatcatgtcgcatgaccagttcggcaagataccgcagtcaccggagttgcagcaacgcatcctgcaagcggagcttgacacggtggaggaaaacctcgaagtcttacggcagcaaggcaagaacgtgtcgcgggcgatgctgaaaggattggagaagcgcaagcacaaccttgtggcgaagttagagaaagtggaacacgccatcaagtcgcgcacagatgacgtggtggacttcaaacagatgggcatcgaccacattttcatagacgagagccaccaattcaagaacttgactttcaacacccggcatgaccgtgtggcggggttgggaaactcggaggggagccagaaagccctgaatatgctttttgccatacgaactatacaggagcgtacgggcaaagacttaggggctacgttcctgtccggcacgactatttccaacagtctgacggaattgtacctgctctttaagtacctgcgcccgaaggaactggaacggcaggacatccgctgtttcgacgcatgggcggctatcttcgccaagaagacgaccgacttcgagttcaacgtgacaaacaacgtggtgcagaaggagcgtttccgctacttcatcaaagtgccggagcttgccgccttttacaacgaaatcaccgactaccgcacggcggaggacgtgggtgtggatcgtccgcacaagaacgagatactgcaccacataccgcctacacccgaccaagagtatttcatcaaacaactgatggaatttgccaagacaggtgacgcgacgttgttgggcaggttgccgctgtctgaaacggaagagaaggctaagatgctcatcgctaccgactacgcgcggaagatggctttggatatgcgcatgatagaccccaattacgaagaccactccgacaacaaggcgagccactgcgccaaaatgatagcggagtattaccacaaatacgatgcgcacaaaggaacgcagttcgtgttctccgacttgggtacatatcagccgggggaaggatggaacgtgtacagcgagataaaacgcaagttggtggaggattacggcataccggcaagtgaggtgcgcttcattcaggagtgtaagacggataaggctcgtaaggcggtgatagatgccatgaacgcagggacagtgcgagtgctgttcggctccacaagtatgctcggaacgggcgtgaatgcgcagaaaagatgcgtcgccatccatcaccttgatacaccgtgggtgcgacatgaagtcgcatagataattgttggaatgatactttaagtatcagctttaacccgctgttccgtcagcggtagcctaccgaccgatgcaccttaatgttgtattaagcggtcgggacaaagtacactttcgcaagacaagacagaaccgtgaggggaagtcaagtatggttagtatcataccgtagagtggcgaggctggatagtatggttagcgtaagcgaactgttagtaaacttcgtaatgtcgtaaaagagtgcaagatactgatacactctacccaaaatgggatgcggtcagataatcctctccatggtaggattacacggatgtaaagaccatcggaggatgagacagaacctaacctatccgttagttatctatgtggaacatggtaagcctgtacatctcctgtcagacaaaagacaggtaagctgaaagtaatggatgctgaatgatgtgcaggtataagataacagagaaagcgaatgccgttctgtaatgggacggatagggtttgagccacttatcacgagttgacaagggacaacatcaacctaccacgaaagtgggcagacttctgtggtaatgtttgggaggcaaatacccaacattagccaaatggtaattctttacaataaacttttagaactttttaaagtaggaatgcaaatgaacgataaaatcaaagaaaatctcctcgaccaatcgtgtgcgccgactgacaacctgcaatcaaattgggacagaatagactggactaaggcggagcaagctgttaagaagcttcaagctcgtattgtaaaggctcagaaggaaggcaaacataacaaggtgaaagccttgcaatggacgcttacccactctttttacgcaaaagccttagccgtaaagagggttacttctaacgggggtggttgtactcctggggttgacaaagaaatatgggatacccctaaagctaaaacgcaagcaataacccaactcaaacgcagaggctaccagccaatgccgctgagaagagttcatatcaagaagagcaacggcaaactgcgaccgttgggaataccgacaatgaaagacagagccatgcaagcactctatcttatggcattggagcctgtatcagaaactacagctgatactcgttcatacggtttccgcaaggaacgctgctgtatggatgcaatacagcaatgtcataacattctccgaaagggatattctcccgaatggattttggagggtgacataaaagggtgttttgaccatatcagccatgagtggttacttgccaatatcccaatggataaggcaatactccgaaaatggttgaaatgtggctatgttttcaacaagcaaatgttcccgaccgaggaaggaacaccgcaaggtggtataatttctccgacacttgccaatatgactttggacggattgcagaaagctcttgcagatagatataagcgccatcatgttaatggtaagttgtattcaccaatggtgaaccttgtacgttatgcggatgattttatcatcacttgcgagaacaaggaaactcttgaaaatgaaatcaagccattggttgctgaatttatgtctgaaagaggtctgaccttatcagaggaaaagacggtgataaccaacgtgcatgacggttttgattttcttggctttaatatccgcaaatacggcaaggacatattgaccaagccgacaaagaaatccgagaaacgctttatggagaatatccgtaaggtaattaaggagaacaagggttgcagacaggagtcgttaatcagaatattgaactctaaaatccgaggatggggaggttattatcagcatggagcgacacgtgattcatttcacagaatcgaccatcagatattcctctcactatggcaatgggcaaaacgccgtcattccaagaaagggaaacggtggataaaagaccgatattggcatgacattcgaggaaacaaatggactttcgcttcaaaattcaagaaaccaaacggaaaggaagaccaattgacattattgtctctgacttcatcgtttccattcctgcaatacacgcagattaaaggagacatgaacccatttgatgcagactgtcgtctgtacttctataaaagaaagaagtcgaaaatgcttgttacgctaaaaggacgcaagtcactgctgtacctatgggaaaagcaaggacgcaaatgtcctatatgcggtgagcctattgatacgcacaaggcatggaatgtcatgccaaccgttcaaaacggaaagaaatgcaatctgttggttcatgatgaatgttttaaattatcccgcaaatcaaatggaaacaagaagtagtttgagccggtctctgcatacaaacagaggcttagaaaagcttgagccgtatgaggggaaactctcatgtacggttcttaggggggaagagggcagcaatgcccttgacctacccgatcgaccgtccgacctgcaacagcgtgacggacggggtgttagagccgggaacgagattgctaagcattttgccgagaacaacgtggatatcatcatctacgcggtggaaaagtcgctggacagctacaagttcaatctgctgcactgcaagcagacgttcatatcgcagctcaaaagtggagcgatgggcgcacgtaccatcgacgagggagcaatggacgaaaaatcgggtatgaacttctcggagtatatggcgttgctctccggcaataccgaccttttggataaggcgaaattagagaagcgtatcgcctcgctcgaaggggaacgcaagtcgttcaacaagggcaagcgcgattcggagttcaagctggaatccaagacgggagaactgcgcaacaacacggctttcatcgaagccatgacggaagactggaaccgttttctttccgttgtgcagactgataaggaaggcagccgccttaatcttgtcaaggtggacggcgtggattcaacggatgagaaggtcatcggtaagcgtttgcaggaaatcgccaagaacgccacgactggtggactgtacaaggctgtcggggaactttacggctttccgataaaggtggtcagcgagaggacactcaaagaaggtctggagttcaccgacaaccgcttcgtggtggaggggaactacaagtacacctacaacaacgggcatctggcgatggcagacccgattgctgccgcacgaaactttctgaacgcattggagaggattccgaccatcatcgaccagtacaagtctaagaacgaagtgctggaaaaggagattccgcagttgcaggagatagcgggcaaggtgtggaagaaggaggacgagctgaaacagctgaagtccgaactcgccgcactggaccgcaagatacagcttgagctggctccggctcaggaaaacacagaagagaaccggcaaggcaacgagaaaaaacagacggaacaacagccggaaagcccgcacgtggactttgtacgcagtcatttaattatagggagacccggtttatcggaatccaaaggtgtaaaactttaatatcgaagtcttgacagaaaaagccagtggttgaatttttcaccactggctttaattctaataatttttcaatctaatatgaccgaatctataacgttaaatcatagattatgtgtctatttgtgaagaaaaagacgtaactttgtatcaaaatcaaataagcataacaatggaaccatctatatacagtttttcactttataccgcactgccgttgatgttattcttcggcttttattttttgtttgcaaagactcctgaaaagaaaattttcaagaattatctccgctctcgacagattatgggtatagctatgctactgctttcggcaaactattcggtacatttcttctttggtatccgattcaaaaatgcggattctgccatattgatgaacatgtccacatacttcctgtgctattctctgttcagttcggcattgataatgttgcttgatcgtttttacattaccaaacggcgtgtgtggacacatatcattttatggattatattctcaactctttccggagttgtgttgttcctgttgccaagcggaatcatgcaaaaaatctctttatttgctttagctgtatggttagtcgtttttggaatcgttttagctcgcagagtcataattgcatatcgtagagccattcggattttcaatgaaactcaggcggatgatataggcacatatatcgaatggctttccatattcacttattgggctgttatcttcggtgtcggatgcggattgctgacatttctgccagacaaatatgtttttatctggattttgtcgtcaataccgttctacagctatcttttctacagctatcagaactacctgctgttctatgaacaggtggaaaatgcttttgagcaagatatacagtctgaagaagaacttctgacagatacggaaacagaacctgaaatagtttctgagaaagaagttccagtgtcctatacagaaattatagagaaagtggccaactggataaagacagacggctatgtccagcagggacttaccataaaagaactgtccgaaatacttcatacgaaccgtacctatctttccgcttatatcaagactacgtataaaatgacattccgcgaatggataaccggtctccggttggagtatgcgaaaaacatactgaaggagcatccggaaatcaatatacagaagctggctgagtcttccggttttctttcccgcagtaactttatcaaatcatttacagagaaggaaggatgtacgcctggcaagtggaaaaaagcaaatctggaataatttgtgtggtaaaaagccgatgaaaaaggtctcagaagctcattttcaaaaagtgctcaagcgacaaaaaagtgctaattcgacaaaaaaagtgctcaaacgacaatttgaaaagtgctcaaacgacaatttttataaaacgctgtatttcaacagaaaaagtttttgtaatattttgggcgctgaatggcatttattacctttggagaagacaaagataataaattcaagtttatatgagcagaaaaatcacttttctcaccctgtttctgtggctgatgacggtaacttttcctgtcattgcgcagcagaaagcagacacgacctacaccttccggttcgttacgcagaaggacatgttctacgtgccttggaatggcaatgacacggaacttgcccgcctgttggaatgtatcgaaaacaacaaagcaacaattcttgacggcaaactgccgctattggttgacggatattgcaattcgcagagcagtgaagtcaagaaccttgcaacagcgaagattcgtgccaaccgtgttaaatcagaactgattacacgagcgaaaatcaaggaagaaaacttcattacccgcaatcatgtgacagagggtgattttgtcaccgtgcgcctgacggtaccggtaaaggaaacagccgtgacggatgcggaagcagaagcacgacgcaaggcggaagccgaacgcttagaaaccgagaagcgtgccgagcaggaacggcttgccgaagagcagcgcaaggcggaagaagcccgacttgccgctgaaaaggcagaagccgagaaaaccgctcaacaaaatacacttgccgacacgctgtcggaaaccaaaatcacaactgattatcatctctccctgcgtgccaacctgctgcgctgggctaccttgacaccagatttaggacttgaatggcgcatctgtccatcgtggggcattgccgtaaacggctcgtggacttcttggagctggagtgacaaagaccgccgctatgcactctgggaagtggctccggaagtacgttactatatgggtgagaagaaagcctggcatctgggcgcgatgttcaaggctggacagttcaactacaagctttccgaaacaggcaagcagggcgacctgatgggtggcggcatcaccgccggctatcagctgcgactaaacaaggcattagatcttgatttcaacctcggtttgggctacctgaatgccgatttcgaaaaatatgaagtcatcgatggtgtgcgcgtgcgctgtggcaacgagacaaaaaattggtgtggccccatcaacgccggtgtgacattggtatggaagttattctaatacggaggaatagagtatgaaagcaagacaatatataaatatggtaggaatggcagccgccgtgctgctctcttcctgcgtgaaggacacgctttatgacacgccgcatcccgactatgggaagattgcggtgacagccgactggtcggcacgcggtgagggtatcgacatacctaccacatggacggttaccatgggtgactatacgggtacggagacttccgccacccatgcccccaaccatctgtttgctccgggcagctacacccttgcggtgtggaaccctgctgaaggaatcatggtaaatggtaccaccgccaccattgccgcagccacgggaaaccgggcaggaacggatgcctttgtgaacaatgccccgggatggttcttcacctatacgaaacaggtgagcatcgagaaagacaaggactatccgctgaccgccgcaatgaagcagcaggtacgcgaactgacgcttatcatcaaaccgacgggggatgccgccggacgcatcacggagattgttgcccatctgacgggtgcagccagaactctcgatttcgctaccgatacctacggagccgcttcaaacgtcgtgctgcccttcaccaagataaccgaaggtgacgatgccggcaagtggaaagccacggtgcggttgctgggtgtgaccggcacggaacaactgctgacgggtgaaatccgctatgcggacggcaacccgacccccacgacgctgaaaagcgacatcacggaagccctcaaggggttcaacaccggaaagggcgaatcgctgaccctcggcggaacgctggttgagactcccgaaggcatggaagtggacggagtcgaaatcaacggctgggaagaagtgaaaggtgatgatgtaaatgccgatttgtaaataattagcaaaccgaacgcagaagcaaagcttgctttgattttgctaaggtgcagcaattattgaaatggaatttaactaatataataacagaatataatgaagacaagattttttgcacttgcgatgctcgccctcgcactggcagcctgcaacaacgacaacgagaacctgaacggtgaccccgtggccgcccagtttaccgccgacatcgcccccgccacccgcgccagcggaaccacctggactgccggcgaccgtatcggcatcaccgacatcggcaacgattcccagtacggcaacgtgcctttcatcctgaaaaacgggaaatttgaggcagaaggaaaggttatctatatcgaagatacaaagacccatactttccgcgcctactatccgtacaacgcggcgggaggcatcctcacagccacgaccgatgccacggcgcagcagaaccagcctgccatcgacttcctctttgcttcaggagccacgggagacaaaaacaacccggtagtaagcttcaccgacaaaaccgccaaaggcggtgaagacaactccttccaccaccgcatgagccagataacccttaccttcgaggcgggcgacggcgtgaatttcagcgtggtcaagcctgaacgttacacgctggacggattgttactcaccggtacgttcaacacggccgacggtattgccaccgcagacaacggggcacagaccggagaactggccatgaatttggcagacggcgttctcacgtcatcgatcatcctcttcccgcagacagttgcatccctgccgttggttgtgaattacaaaggtcaggaatatcatgccacactcaccgtgcccgaaggcgcactgctggcgggcaacaactacacctataccgtcaaggtacgcaacaaagtccttgaagtcagcgaagccaccattgcaaagtggaacgatatagacggtggagatgtgggtgctgacctgtaggattttaataattaatcgattagaatgaagaattatgagacatagattatttatccccgcagccaccgcactgctgttcgcccttgccgcctgcacgcaggacgaacttgctggcgataaccgtctgcccgaaggtgaataccctgtattcatccgtgccaccggactgtccgtagaagcaacgccgctggcagcctcttccacccgtgccgctgtggacggcgactggcagggcgtcacttccgtggcactcaagatgggcgatgcggtaaaggaatacaccgttacggcttctaccgatttcaagagtgccacgctctcacgcgagaacgacccgtactactggaccagccgcgacccgattaccgtatcggcatggtggcccttcaacaatgccgacatcacacagatgcctgccgtgaaggtggccgaagaccaaagcaaattggctgacttccagaacagcgacttcatctctgctgagaaccggaaggtggaatttaacaacccgactcttgaatttacccaccgcacggcacgcgtgacaatcgaactgaagcccggcacgggattcacgagcgtcgctggtgccacggtgagcctcgtgagcctgtccgccgataacggcaacccgaccgccatcaagacctacaacgcaagcggcaacacctacgaggcactaaccgccccgcagaccattgcggcaggcaaaccgttcgtcaaggtggaactcggcggcggcaccttctacttccgtccgcagaacaacgtcgtattagaagcgggcagccgctataaatataccgttaaggtgaacgccaccggcctgacgttagagggttgcaccatcggcagctgggctgacggcggcggcgagagcggcgcagccgaggatttgggctacatctacgacagcaacaccaagacctacacggtctataacaccaacggcctgatgaatatagccgaattagtgaacggaggtaagagcgacattaacattaccctcgacactgacattgacctcacaggcaaagactggacaccgataggcacagactacgacaactcatacaaaggcaccttcgacggtggcggccataccattacggggctgacctttacgacaaatgacgaatatgcgggtctgttcggctggctcaatagagctggtacggtgaagaacgtggtgatggagggcgtacagataacaagcaatcaaatatatggcggcagtattggcggcgtggtaggatatagctggggcaccattgaaaactgctcggtgtcgggcagcgtcagcggcacggtgtatgtcggcggtgtggtgggtgctcaaataggcggttccatcaccggatgcagttcctctgccacagtgaagggaacggtcgatgtcggcggcgtggcaggtcagacgaattcgagtgccaccctgaccgcttgctatgccacgggcaacgtgaccatagaaataaaccccgcaaagaatatcgctggcggcagtctggtgggaatgaacgcaggaagcagcctccttgcctgctatgccacgggcaacgtaaccagtacgggtagtagcactggcaaagtacatatcggcggctttttgggaaataactacaccaccgtgaccgccggctattggaagaacaatcatgaacaaggcatcggctacaatagggaaagcaccggagccacgaaggtggacggctctgtcgttacctggcagaaagccgtcgatgccatgaacaccgccttgcagaacgcaggctcaaggtggcgttacgaacttaaaggagcattgcctaccttgatgaagcagtaaaccgtcgggcggaaaagttctgcccgcaacggaaacaaccagagtaataaaataacagatattatgaggataagattttttgcacttgcagcgctcgccctctcactcgccgcctgcacgcaggacgaagcgggctttctgccggaaggggcggaaggcacacccatcgtcttcaccgccacggggctgaatcccgccgcgaaagccatcgccggcacccgtgcccccgcggatggcaattgggagggtgtgcagagcgtggcagtgctgatggacggcatggtgaagacgtacgacgtgacgccctccaccgccgaccccaccagcgccacgctgacctccaccgacccgtactactggaccaaccacaacgacatcaccgtcacagcgtggtggccctacaccgagggcgagacaaccccttctgctgtgaaggtaaaagccaaccaaagtgcccggaaagacttcgagggcagcgacctcatcgtagccgacggacagacggtgacctatggtagccccacgctccgcttcacccaccgcacggcgcgggtgaccgtcgttctgacggactacaccgaggggctggcatccgtgcagctgacgggtctctccaccgagaatgacaatccagataaaatcaccccgtatgacaagggcagcaacacctacatcgccctcgtagccccgcaaagtgtggcagctggcaggaccttcattacgtgcaccttcactaacggcaaaaccttcgtttataagatgaagaatgctaccgactggcaggcgggcggtgaatatacctacaccgtctccctcgctgcggcaaaagacctgggctataccatagagagcgacggcagctacaccgtgacctccgccgatggcctgatgaatgtagccgaattagtgaacggaggtaagaccgacattaacattaccctcgacaaaaacattgatctgacgggcaaaggctggacgccgataggcacaagcttcgataactcatacaaaggcactttcgacggcggcggccataccatcacggggttgaccgttacgacaaatgaccaatttgtgggtctgttcggctatctcaatagagctggtatggtgaagaacgtggtgatggaaggcatacagataacaagcaatcacatgtttggctgtactggcggcgtggtaggatatagctggggcaccattgaaaactgctcggtgtcgggtagcgtcagcggcacagattgtgtcggcggtgtggtgggttcacaaaaggccggttccatcatcggatgcagctcctctgccactgtgaagggaaagcactatgtcggcggtgtggcaggagaaaaatggggcaccatgacagcttgctatgccacaggcaacgtgaccttagaaatagcttcccaaaagaataactttggcggcggtgtagtgggattaaacggaggaagccgcgtccttgcctgctatgccacgggcaacgtaaccagtacgggtagcagcaccggcaatgtgcatatcggcggcttgtttggagatagctacaccaccgtgaccgcctgctattggaagaacaatcaggaacgaggctataagaccgcccccgaatccacgaaggtggacggcacttacgttacctggcagaaagccgtcgatgccatgaacaccgccttgcagaacgcaggctcagagtggcgttacgaacttaatggagcattgcctaccttgaggaagcagtaaaccgtcgggcggaaaaagttccgcccgcaacggaaagaaccgaagtataaccccaataaagaaaggaggacgtgatggaacacacggagaatccaccatattggttttggcatcaaggcattgtcaataataatatagtctccagtgtaaatatggaagctgtaagccggacattgtcaagattggtgctcattaaagacaacaaatcaagtatttaaattaaaaacatgggactttttcacagaggcaagaaaaataatgacgatgagccggacagtgttcaaaccaattcattctctgatattatgaatggtttgcagtacgccgtaaactgtgcacaagatacattacagaatcatcagatacaaaatctgaccagactttttgaaggaacaaatgcaaataacgcaaatacgttccaatcaaaaaaaatcatggttggagacaagactattgatattccacttatagccttgatatcccatcattatcttgcaatggataatgtgcagataaagttcaaggcgaaggtcggaagcgtggaatcacagattccggaaaacaacttgctgttatccagtccgcacagagccaatctccagatgcagatgagcaacataaaaccggatgcggatgatatcatggaggtttgcgtcaattttaaagttcaggagactccggagagtatttcccgaatcattgacgattttgtaaaaaatatctaacaattttaaaattcaaatgttatggcagaagaaataaagaaccaagggcaacaagaaaatgcggaaaacttgaatgaaaatgtaagcggacaggcgaaagaaattatctccgctgcattggaagagactcaaaacagagaaacttctccagttcttaaagcagattcaaacgtgactgacaaattcaaggggcttcccatgcgggaacttattgcagctccacttattgcagcagccgaagcacaacaggaattggcagcgacagcatggaatttctaccagcaaattgcatttgatggtaaaagcggcaataaagcgcgtatattggaattcgatgtcgaaagaccgatacagcaggatggaaaaatgacaacaatgtcacaaagtgtcaaggctccgtttataggattggtgcctattccttccctgctcatagatcgcgtggatgtcgatttccagatggaggttaccgatacatcaaacgtaaaaagcactaccgacgcagaagtagaggcaaaagcttctgcaaaacattggtttataaatgcggaaatcagcggcaaagtcacgaccgcccgcgagaacacccgcatgaccaaccaaacggcaaaataccagatacatgtgacagccagtcagcagccgcagaccgaaggtctgtctaaactgatggatataatggcatcatgtatcgagcctataacaaacgaaagtaacagtaagtaaatatatgaatttgattcaagcattaagattgccaaacagtcaagcagtaatgacaaatattgcacggtttcattatcaaaatatttataatgtaggtttgacccctccgattttcacgcaaagtaatttgacatttcaaataaaaggatatacccgtaactatcgttttcttagattagactacgcctgtgtcatatatattgcggatagaatagcagtcgttgcttcaaatggcatagatactttaagttcaggtttttcggggtgttatatggccagttttaggcacaatggcattaggtatgttgctcatattccaacgcctaacaatagtattaaaacatcatggaatcgggcggttaaaaatcgaataatagataatgttgttctttttaaacctactgaaggattggcgagaatcccaggaaccattggtatttggggaattataacatttaacgatagatgttatcggcttgatgtaaatgaaaacgctcctccaagtcaagccatacgtggccaaagaatttttaactcaatcccgagaaatcccatactaacagaaattccacctatcgccggtggtcagatgccttaataattataacaattgtaaataagggaagaatggttgtttcattgaggagtagaattctattcggatatataattctggtggcggtcataggcagcatggccgccattctcatccatgaacctgcgaagttccacgacctatatgcgtattttaaataacggtatttacacaaacagcaaatgagcgaacaattcgttaccactaccaagcatttccgcaagctgcttgccgcaggctatctgttgatagtcctgctggtgggcggcatcatctgcacgtggctcggagaatggcgcgacttggagttgctggaacgggagaaccgtgaaatcaaccgcttccgcaaggaaacacacgatgcgtatgtgggtgtggtggagttgtctcttttgggcgagtcggtgctggaatgggacgataaggatgtggcggcataccggcggcaacggatgacggtggatagtatgctttgccgcttcaagagccattacgaatcggtgcgcatagacagcgtgcgccacttgctggaggacaaggaaaagcggctgtgcgccatcatggaggctctggaacaacaggcggatatcaaccgccggatagccaagcaggtgccggtgatagtgcaaacgagcaggcaggaagagccgaagaaacagaggaggaaaggttttctcgggttgttcggcaagaaacaggaagcacctccgacgacgaccaccacgatgctctacacactgaaccgtgatatgatagcgcaacaacgtgcccaaagccatcgtctgtcggaatatgccgacagccttgccagccgcaatgcggaactgaaccgccaactgcaaacccttatccagcagatggaccacaaggtgcaggctgacttgcaggaacgtgaggcggaaatatccgctatgcgtgaaaagtcgttcttgcaggtaggtatcataacgggtgtcatgctgctgttgctcattatttcatacatcatcattcaccgctatgccacccgcatcaagcagtacaaacgtaagacaacagatttaatcgggcaactgcaaaagtccgtaaaacaaaacgaatcgttgatagcctcacgcaagaaagcgatgcacaccatcacccacgagctacgcacaccactgactgccatacatggatatgcggaactgatgcaggacaacgaagaagaaaagataagcggttatgcggacaatatcctgcaagcctccaagagaatgaccgacatgctcaactccctgcttgacttcttccgcttggacagcggcaaggaacaggcgaatgtccgtccgtttcgtttggaaaacatcgcggagctgttgcaaacggagtttacgcaacaagcagaagcaaaagatcttaaacttaccatcgagtgcccggagggtattatcctgaatggcgacaaggagcgcatcatacagatatgcgacaacctgctgggcaatgccgtcaagttcacgaatgccggaagcgtttcacttgtcataagctatgacggcaataggctgacccttgtagtagaggacaccggaaccggcatgagtgcggaagaacaacagcgagtgttcggagcgttcgagcggctttccaacgccgccacgcaagacggtttcggattggggttaagcattgtgaaacagatagtcgggatgcttggcggcactatacgcttggaaagcgaaaaaggagaaggcagtcgttttactgtggagttgccaatgaacactgccgatattggtattgaagaacagacagccgcagaaagtctggctcatatagaaagaccttattctgtcatcgtattggacgacaatccgatggtattatccatgacaaaggaaatgtatgctggtataggtgtgcattgcgacacgttcaccactattggcgatgcaatggaagccatgcggcagcacacatacgacctcatgataaccgatatgaagatgccggagattaacggctatgaggtgttggagttgttacgctcgtcaagtgtcagcaactcgaaagagattcccattgtcgtggcgaccgcctccggcagttgcagcgaagaggagctgttggaaaatggatttaccgcctgcctgttcaagccattttccatttccgaactggttgctgtatcagacaaatgccttttgacaagtacggacaaggatgaacttcccgacttgtcctctctgcttgcatatggtgacaaacgggcgatgctcgaccgtttgataaccgaaacagaaaaggatatgcaggctgtccgggaaatcatggagaggaatgaccgcaaggcgttggacgaatggatacaccgtcagcgaagttcatgggctgttatccgtgctgacaaacccttgtggaacctgtatgaactgctgcatcaagaatctgaatgttccgaaatggaattgcggaaatgcgtggatgccatgcttcgtatgggaacagttatcatagaacttgcgcaaaaggaaaggaggttgtcggatgaaagtatttgtgattgaggacaaccccgtctataacgattatgtctgcaacctgctgaagaaagacagcttcgatactatgtcggcatataatcttgccactgccaagaaactattggtaaagtcagaggtggatgatattgtcgttgccgacctacgcctccccgacggtgaaagcatagagttgttacggtggatgcgtgccaacgacaaacaacaggtgtttatcgttatgaccaattacggggaggtgcatacggcagtggaaagtatgaagctcggctcaaaggattacatacagaaacagttgttggaggataaactgataccgcttatccgcaccctgcaaaaagaacatgaaaagcgactacaatggaacattccgatattcgtccggcagggcgaagcctatcagaaaatcaagaaacgtgtgcgccttgtagccaccacccggatgagcgtgctgatactgggcgagaacggtacgggcaaggaacatatcgcacaacatatacaccaacaaagcaaacttgccgataaaccttttgtggcagtggactgcggagccttgtccccgtcattgatacaatccgccttcttcggacacgtcaagggcgcgtttacgggtgccgaagcaaacaagacggggtattttctggaagcggatggcggcacgctgttccttgacgaagtgggcaacctaacaatggagatgcaacagatgctgctccgcgccatacaggaacgccgttaccgtcccgtcggagcaaaggaggacaaaacagccaacgtgaggatagtggctgcaaccaacgaggatttgcagaaagccgtaacggaaaagcggttccggcaggatttgctctatcgcttgcaggagtatgtgataaccatgccgcccttgcgcgactgcccggaagacatcatgccattggccgagttcttccgtgaaatggcaaaccgtgagttggaacgtgaagtaaaaggttttgccgcatctgcccgtaatgccctgctcgcccatgcgtggccgggcaacgtgcgcgagttgaaacagaagatacagacggcagtcctgcaatcagaaggcgatatgataaccgaagccgatttggaacttgacaatgaaccgtccgctacttccgcttgttttacattgaagagcggggatgaagaaagaggacgtatcctgcgtgctttgaaacaagcagccggtaacaagaaaatggctgcaaagatactgggtatcggcaggacaacgctgtataataaattggtagaatatggattgaatgaagaaaactgaccggagtatggctgtaaatggcaataattgattaactttgcaattgtatttcagaaaatagcaggcgattgggtaacttttcgccgatgatatagacataagaccgcaaggcgtttcgagcgaaaatctggtaaattgaaactacggagacgattgcgtgatgcttatgctatgcctacgcatagcgtgcattcacgtactctccgtaaaggctttaccagagccatcgcttgaaagtagtgtgaattgcacgctacttttttgcctcgccaaaaaggaaaggaaatacgttatggcgaaaatacaattacttgccgttatctcaatagatggctgtccgatgaaactgcatccccggaagcggttgcttcaaaccgaagattacggtatggatgaaatacgtgccaatgccctgtataagctgacatccgactattcggtatccgtgcttcaagaatggagggaggaaggtggaagcatttgccatttgttggaagtaactgccgggaataccgaatatgccaacggactgttacggatgaacgtgatagatgaaatcatactatacgttgttccaaccatcgacggaaacggagcgcattttttcaagtcagcactacctatgaatgactggcggcttatggagaacaaaacttatagggacggagtaatccggcttacctatcataaagagccacgggcataaaatgttcagattatgaacatcttggcggaatttccgtgttcagaaagtgaacacatgttcagaatctgaacacattttacaagggatgcaatcaaggataaaattatttttgaattttatctttctgaaaaacaatgtagtacaattttctcacaatcttttctcgtgtttagggctatgatttgcccatatatcagtgtgcgcacactgataaacaagtgtaaaccctcaaaacagaaaagataatgaaccatctcatattggcggaaacacagtttttcgccctgataaacggaaaagacaacggtagcacggaaacggcatacggcggattcgtgcaggaagtaataaacctgtgctacggcggcaatgatgccaagcatattattgtggcgttggcttttgccgaaatcgaattacagcaccatccgcagaacttgtcggcatcggaggagaatgtcgtcactgtgtatatccgcaaggcgttatcattcatccgaaagatgcagaagatggtatccgcttctgcaattacctccgtgccaccactaacatccacatccgaaaccaaagccacagtcccagccctgcaatggaccggtaatgccgtcgagttggtagaactaatctatgccctctacgccaccggctgcatcaatggcggcaaggcttcgctgaaagagcttgcccctgtcctctattcctttttcggtgtggagtccaaagactgctaccgcttctatacggacatcaaacgcaggaaaagcgacagtcgcacctacttccttgaaaagatgcaggacaaactgaacgcgaagatgcgacatgacgatgaattggagcggatgaggagataaacgaatgccaaacaaaggataagcggccggattatacggtttcttatccttcttcatttacaatcactctattatctgccggaaagccgattaaaatcattaactttgcaagtattaatcaatgacggatgaaaatagataacctcgaaatattgaatggactgattgccggagccgaaggcgggacagttgagttcaaagaaactaccgggcagttggagcgtggaattgaaactctttgtgccttcttgaacggtacgggcggcacggtgctgttcggtgtaaccgacaagggaaagattatcggtcaggaagtgagcgacaagacgaagcgcgatattgctgaaaccatcagacgaatcgagccgtttgcgaccattgatatatcctatacagacattccgggaacgaacaaaagtgttatagctttatcagcggaagaacaacgatatatgcgcccgttcacctataaggggagggcttatcaacggatagagagcgttacatctgccatgccgcagggtatatacaacctgttggttatgcagcgaggcggaacctatgcttgggattccatgcaaaatcccggcttgaaaatatccgaccttgacgaaacggcaatcttgggcgcagtacgtggaggaatcagaggcggacgtttgccggaaggttctatgcaggaggatgtccgaaccatccttgaaaaatttgacttgttgaatgatggaaagctgaacaatgcttccgttgtcctattcggacggaacttctaccattatccccaatgtctgctccgtttagcccggttcaaaggaacgacaaaagatgaatttttagataatcagcgtgtgacaggcaatatattcaacttgctggatgctgcaatggcatttttcttcaagcatttgtccctttccggtaaaattgaaggtttgtacagagaagaggaactgaatgtgccatataaggcattgagagaatgttgcataaatgcttttgcacatcgtgtttaccatcgccccggcagttcagtcgggattgctatctatgatgaccgcgtggagattgaaaacagcggaacatttccgcctgatattaccattgagaaactgttgggtggccacaattccgaaccacaaaatctgatagtagccaatgtgctgtacaaaagtgcagtattggagagttggggacgtggcatagcccttatggtaaacgaatgtcgccgtgtcggtattccggatccggagtttcataccgacggcaatgctgtatggattgtgtttcattatacaagaactacagtaggacaagaccccacagcacccccacagcaaccctatagtaaccccacagtaaccccacagttaggaaaactgttgtctgctattgggaacaacactctctctgctaaagaaatcatggagaaaacgggaatgaaagataaaaggaatttcttaaagaactatatccatccggcaataaattccggtttggtcctttcactttatcccgtaggctccaagagtccgcaacagaaatactatcttactgataaaggtaaaggtttcctgcaacaataacgggtatggctaaaaagaagaaacataagaatgatgtaaaaactgatttaccgataatcatggattatggtatcggcagtatatccgtttatgacccggcagacatgatgccatacaacgagccgccaattagcgaacaaatccgcttcaagaaactcggcaaagagatgaaatccgagttcaagtggctggtatcttccgtagtgattgagtattggcaagaaaaccgacagatacctttcggtgaagaaatgtcgaaactcagaaccagactgttgagaatgtttgccgaagaatacagcatactgcttaaagacgatacagagctgaaaaattatttgctgacgcttgccattaccaccatcaacaagcatctcaaatctgagaataaaaagagggcgtcaaaactctctttttaacaaaattacccttgctacagatatctgtgacaggggtaattttcatattttgggtgttttgacacatcccctttttcatatataaaggaatctgttatttctgctgcaacaggtgtttcaagttttcatcatttgcgatacgttccagttcctcttgaacaatctgcttcacttcctccttgatgcgcctgtaattcgcctgaaccgtttccttcatgcggtcgttgccgtccccgtccgtaaagtcggtaatgacggggattttcttgtaggctttctcctcgcgcctcaccttctcggcatccacgacaatctcacaatgaaaaatcttctgctcgatacgctcgttgaagttgtcggacaccgaaccgacaaacataccctgcgtcaagccggaaatcttgctcggcgggatgagtgaatccatctgcgtgttgatggaggtggaaacatcctgccggttgatggaaatggactgccgtttctgcaacaccttaccgaagcgttcggaaagcgtcttggcggtttcacccaccacctgaccggaaaagatattgccgacggtgttcatcacgaccttcgcttctttatcaccgtagtcgcgcaccaactggctgaaatcctgaaagcccagacacacggcaaccttgttgcttcgcgcggtggcgataaggttgtccaaccccttgaaataaatcgtgggcagctcgtcgatgatgaccgacgacttcagcatccctttcttgttgatgagtttcacgatacgggagttatacagaccgagagcggccccgtagatattctgacggtcgggattgttgcccacacagagtattttcggttcttcgggattgttgatgtccagcgtgaactcgctgtccgacatcacccaatagagctgcggggaaatcatccttgacaaagggattttcgcgcttgctatctgccccatcaactgctccgcagcccctccgagccatgcgtccatgaacggagaaagatagttttccaattccgggtaagaggtcagtatcgggaaaatatcctcatagcggcggttcaggaactcaatcgcatgggggaacgtgcagtatttgccgccttgatagattttgagataccatataatgctggcaaacaaaataataggtgattccacaaagaagtcgccctgcttctgcacatcgggtaagtcaagggcattgctgcccccttctcccctaagaaccgtacatgagagtttcccctcatacggctcaagcaactcaatatttctatttgttgttagaaatcggctcatactttcaacattttcgtttatttcgcttgtagcagttgttgtggacaagttgccgtacaatcgaaccaccaacagatatttcgttgacgttccatgcttttgtacaatctatttccttgccgcataacggacaaatccggttctgcttgttccataaatataagagagacttacgtcccttgagagattccagcatttgttgctcctttcgctgaaagaaataatcatcgtattccgggtcgaaagggtttgcctcacctttgatttgcttgtacggggtataatgtatatccgacaaccttttaagggtcaggtagttcactttcttgctcttggtttcatatttccatgcaaacgtccatttacgcccccgaatttcatgccaatatttgtctgcaacccaagacttgcgtttctttggatggcgacgtaaagcccatttcttcgtgagattgtaaatgtgattgtcacaaccatgaaaagcatcggttgatgcaccatatcggtaatagttgccccaacctgtgattacaggattaagcattcgtatcagcgattcctgcttacacattttatgtcctttaacgatgtcaccgatttttgccctgaagcgtttctgtgcatctttggacggggatgtgtatagccttttgccaaacttcctcacattgaaacctaagaaatcaaaaccgtcgtatatgttcgtaatggtagttttctcttcggataaggtcagccctctttctttgagaaattctatcacgataggtttgacttcgttttccaatagctccttatctcgacctgtgattataaagtcatccgcataacgaataaggtttaccttgtagtggaatgtcttattgttgcgccataatcttttgaatctttcagccaagagtggttgaagtccgtcaagtgctatatttgcaagtgtcggtgatatgatacctccttgtggtgtaccctcttctgtcgggaatagtttgccattgaatacagctccacatttcagccattttctgagtatcgtcttatccatagggatatgattaagaagccagtcgtggctgatatggtcgaagcagcctttaatgtctccctccaaaatccattcgggggaatgctggcggtttagaaccgtatcaatctgacggatagcgtccattgtcctgcgtttcttgcggaaaccataagaaaagcggtcgcctgtcgtttcggctatcggttccaatgccatgagatataatgcctgcatcgccctgtctttcattgtcggtattcccaacggtcggagtttaccgttctttttcttgatgtgaaccctacgaagcggctgcggattgtaaccacgacgtttcagttcaccgattgctttgtacttgcgcttgggagaatcccaaagctgtttatctactccagacgttttcttccctttgttggaagtaaccctctttaccgccaatgccttggcgtaaaaagagtgggtcagcatccactgcaaggctttcaccttgttatgtctgccttccttttgagcctttacaatacgcgcttgtagctttcggacataggcttcacacttggaccagtccatgccgtcccaagttagattcctactatcagcaggcgcacacgatgttttagtttcgttcatttgctttcctccttttgaaagttctaaaagttatcttgtaaagagttaccatatacggaagtctgcccactttcgtgtcggatgatgtcaccaataacaactcgtgatgttgattcaatccgtatccaccccattacagggtggcattcgctttttccgttatctcatacctgcaccccattcggcttgccttgcggttcgcttactcgcattcttacgagagagatacaggcttgccctgttccacgtaattgacaaacggatagtttaggttctgccaagtccgccggcagtgctgtgtccgtgtaaccccaacatgggcaagggttatccgactgcttaccttttggtgagagctaaagtatcttgcgctccttcaaaccttacgacggctaaagtcagttcacttacgttaaccatgctatccagcctcgccactcaacggtatgatactaaccgtccttgacattccctcacggttcagtcttgtcctttcggaaagtgtactttgtcctataagcttggcacaacccatcactggagatgcaccttatagtaggctaccgctgacggaacagcgggttaaatcatgcaattaatatcactgtctaacaatcaattacgtgactttacaggtcacacccatgttttattgaggttgagcattatcgtataggcactctcgtaggcatccgtaatatcctccatgaaatccgggtggatgggattacagcggtgcgagcgtcgcgggtcgtcgaagtttatcacataaaacttcggcttcaccttgtaaccctccgggtggttcagcagatggttgtaggcgattgtagataagtcgctgaatttgaagtcatatacatacatcgaaaagcccttttcaatctgctgcttgatgaaactgtttaccaccgcgtatgactttccactacccggcgtacccaacacgatggaggcacgaaaaggattcaccacattgatccatccgttgttccaacgctttttgtagtagaaccgtgtcggaagattgaccgaatactcgctttcgataagccttgtttcctgcatgaagctctcgttctcgttgttgaacacatcatccatgaggttgtgcttcaacaggcggctcaaccacagaccgcccatcagcaggaatacatagcccgcgccaacggtcaggatatacagtcccgtcaccgcctccaccggcaatggcagggccagtatccaccagttgaggaagaacagcacgaagcccacggcaaggaccgcccagattttcccccacgtgattttctcgcccttcacgccctttgtccccagacaggacagggcaagcaggaggacggcaaatagtttcgtgtagaggatggaacggaacagccccgccgtgcggttgaagttcatcagtatcctgtccaccacaccgatgtccacaccccagagccgtatggcttcataacagaaccagtacacgttcatgaccactaaaataatactcacggcacgcagaaaatccatgattttcgccaacgccctcaaatcgtcttcttgttgtgacatacattgatttttttgattgttgatattttcgattacattcccaagcccttgcgcttcttctttttcttcttgcgctgcatcgcccggatgaaggcttcctcctcggcgtccactgccggaccttcgggggcaaacaggttcataccacccgaatggttctcgtattcccctccggaatatccttgtttgtcctcttgtccctccaccataacggaaagcggaatcgacggctgtccagcgtaaggctgcgtgaagtgttcctgcaaggcgttggcggaaagttccttgcccatgcgtgagccgttcagcacgcagcccgtacggtggtcgatgaacgtggctccgtagatgcgcccttcctccgtgtagcgtagtacggtgtcgatgccctttcctttgagggtggctacaaacttctccttgtcatacgtgccttccagcacggaaaggacggtgcgtttcgtcatgtcggcaagtttcctctccttaaactcctgcttggaacgggcaaacttcttctgtacggcttcatagccgacggacttcccgaacagcgaggacttgaaaggattgccgaccttgttgcccttgtcgtccgtgacggaatagaccagcccgtgatactcacgtctgcgcacattgccatgtgcttcctccactgtcatattatataaggaaaggagggcacggtattctcccatcgtttggaaacggtattgcccgttcaaagccttaacgatattccccacctgcttcttcacgtcgcccgcagaggcgtccaccttgcgcagcggcgtgtcaagacggcgattcttgcgttccgcgtcatgcagcccgtacttccgttccagttcgcgtgttatctgcttgctccggtaaaaattgttccgggtgtctatgctcctgccgttctcgtccaccctgaccgtcacgatatgcagatggtggcggtcgatgtcctcatgcttgaaaacgagatacggctggttgccgaagcccatcttctccagatactcccgtgcgatgttctgaagctccgtgtccgtcaaaatatcgtcgggatgcggattgagcgagatatgcaccaccggtttctccaccttcgaccgcacgggcatcagagcgagaaagtcctccatagcccggtggatgtccatcgttcccgtaccgtcattgtagatgcggttggttgtcagaagccgccctttcgcctcgttgatcttctccccgttgtaggcaagtgcgccatacaacgagtttcctacactgatttttgcgaccatttttcctgcatctcccttgaaagttccacaatcttacggctcagttttacgagttcgacggtctgttgctccaacttgtaaagcaacgccatcgcctttttctcggaaaaatgcagcctcagttccttcactacttggttgtagttcgtgcctatcgcgcggaactgcgcatgaaaatcggacagtttggtgtagtaatccaccagcgtcttgtccactttcagcaccttgaacggctgcccgaagaagtgcgctttcaggaaaaccgacttggcgtttacgcctgacttctcgaacatggagaggaaacggttgtgttcctcctcactgaaacggacggtgtagcggaacaccgccgggtcgagtttgggatttctcccgcctttgtttcttcttttttcactcatattactttggatttagcggtttgacggcataagccgccgctttgaggcacagcaccgcaggtttgagaggcttcccgacttcggagggtaagcccgccccctgcaagggcaaggcgttttcgtggctgctcaaaatgttttgagcggctgaaaacataccttgctatgttcaggtgaacataaaaatccgtcggggacggattggggatgattcctttcaaactccgggctgcgccacctgcggcgtaccctgccgttcgggtgcaaagttacgcccttaaggcgatgtccgacagaggcttgacccggacaatcagtgccaaccggcgcaacgtgctgccacttgccggagaagtgatacaagttccaaaatatccttgtttatttgcagtgtgattcggatgtgggactgaaaatacactccttccgccagatgttcggacagcaatccgggcatcaatccaaacggttgaaaacaggtgtatgtattcagatagttttccaagcacacgtccatgcggacggataaaagcatgggcggttggacaaaccgatgattacccataggcacagccggattaaggagtgaataaataaatgaatgggagcgcgtgcgtacgtactaatgacaatacgctaccgccaccggacagatgtataaccaaataaattatcaaaaaaatgaaaaaagcaacttatgtggcaatctccacgcagaaaggtggagcgggtaagacaaccctgacagtgcttgtagcaagctatctgcactatgtgaaaggctacaacgtagccgtggtggactgcgattttccacagtacagtatccatgacatgcgcaagcgcgacatgaaagccgtcatggaggacgggcattacaaggtgatggcgtatgagcagctcaaacggctgaagaagaacccgtacaccatcagatgcagccgtgcggaagatgcggtaaagactgccgaaaatctggtggcagcgcagcccgacctcgatttcgtgttcttcgacttgccgggaaccatcaacaatgccgatgtggtgcagaccatttccaaaatggactacatcttcacgcccatcatcgccgaccgtgtggtgatggagagttccattaagttcgccaccgttatcaacgaacagatgataagcacgggcaagtccggtatcaaagggatttacctcgtgtggaacatggtggacgggcgcgaaaagacggaactttacaaagcatacgacaaggtctgtgccgagttcgccctgtccattctggaaacacatctgccggacagcaagcgtttccgcaaggagacggcggcagaacgcaaggcagtattccgctccacggcgtttccggcggacaaaatactggtacgcggcagcaacctcgacaaactcgtcgatgagattctcggcatcatcaaaaactgaatggcatggcaaagaaaacaagaatcgaggacatcgacagcgaagccgtaatcaactcgtttcgactggacgatacaagcattccgccggaagcgagaagcacggacgggaacgctcctgtcccacctccgaaagaagcgatacaagaagccgtttctccacccgcctcgcactccaaagaggagccggaacgcaggcgcaggaacagcaagccggaaaaattggattatgacacagtattcatatgcggttccaatatcacggcaaggctcggcaagcaggtctatatccgcaaggagtaccacgaccgcatacagaagatgcttcatgtaatcggaggcaacgaagtgactatcgcggcatttcttgacaacgtgctgacacaccatttcacgctgttccaagacgagatagccgaatcgttcaaacggcacatggaatcctataatttataaacactcaaaaacaacaaagaagtatgaaaagaacaaataagaaccgtcaggctgagtatctgcaaacaggaaagagtgaaagaaccgctgtccgtgcagcaaagtgtgtaaccgactacgggcaggaaaataccgacgttgacttccgcaaggataaaggcagagacaaaccgctctcgactttcctgcaagcatcggaaatcaaaacgcggcaatgtatatacatcagccgagaaattcatgagaaagtcgctatcgttaccagtcggatgggaaacggtttgagcatcggcaagtttgtggataacatcctccgcgaccatttccggcaatacgggcagcagtacatggaacagattgaaaacgcccaaaaagtaagattatgacaaaggcgtttttaatcgtatcggttgcttgcaacgtgtggtttctgtttctgctgttctatgaccgcatcatggacacgaagctcatccgtttcttcagacatattgccgggctgtggcggtcattggacagtacggtggcagagcaaggaaaggataaggaaatacctcacgcagacacctcggacatcattggcaagagccgtttcaagatggcatcgacccggacaaccgctgccataccgacgcaagaagccgccacttcggaaaaaggcattgagctgtcggaggaagaggctacttttgacgacggaaacacggaaaccgtctcacgcccgacacaagtaccggaggacaaactcgatgaaaccttcacgagcatcccgccctcggaactggagtacggagaagatgaaccggaggatgaagaaccagacaaaaagcaggcttcgggaagtagcttcgaggatattgacatggcagtacacaccatacggaaggaatcaccatccgatgaggaaatgcgacacgccggaaaggtcatgacggaactggacgggacagagcttttcacaagaataacggaacgcctgaccgatgaagcaatgagcgagaggcttgcaaaggcgatggcagttttcgtggacacggtgaacatgaccgtgacacaacaaaaggaaaaggtgttcgtgattcccgacaacatcgaggagttcgacttccgaaactatgtataacaactaaaaaagaatggaaatgaaaacgtaaaatgacgacacccacgcgcacggcggtacaaggtacagccaacccgcaacggacagccccaagtccgtagaaacaaacgggcaaccactaaaaccaaagtaaagtaatcaagtatcaaccgcccgaaaaaggactatccaccctttggacggcacaaaaaagaacagtttatgaacaagaacatcagacaaaagttaatcatcgctgcggcacttatgattgccgcaaccgcctccgctttcgcacagggaaacggtctggctggcatcaacgaagccacctctatggtgagttcgtatttcgaccccggcacgaaattaatctacgccatcggcgcggtagtcgggcttatcggtggcgtgaaagtgtacggaaaattctcgtccggagacccggacacctcgaagaccgccgcctcgtggttcggggcttgtatcttcttgattgtcgccgccactatcctgcgctcattcttcctttaataaacaatgtatggctgaatacccgataaacaagggtatcggccgtccggtcgagttcaagggtttgaaggctcagtacctcttcatcttctgcggaggtctgctggctctcttcgtcctgttcgtcatcctctatatggtcggcatcgaccagtggatatgtatcggcttcggcgcggcatcgtcttccgtcctcgtatggcagaccttcgcgctgaacgcccggtacggcgaacacgggctgatgaaattgggagcggcaaggagccatccccgataccttatcaaccgacggcggatcacccgattactcaaacggcaacgaaaggaagaaacgacatgagaaatacatccaaaatgacaacactggaaaacaagttccccctgctggcggtggagcatggctgcatcatctccaaagacgccgacatcacggtggcttttgaggtggaactgccggagctttacaccgtgacgggcgcagagtacgaggcgatacacggctgctggtgcaaggctatcaaggtgctaccgtacttctgcgtcgtgcataagcaggattggttcatcaaggagaaatatatgccggagttacagaaggacgacatgagtttcttgagccgttcctttgaacgccacttcaacgagcgtccgtacctgaaacactcctgctatctctacttgaccaagacgacgaaagaacgtaaccgtatgcagagcaacttcagtacgctgtgccggggacatatcatcccgaaggagctggacaaggaaaccgccgggaagttcatggaggccgccgaacagttcgagcgcatcatgaacgacagcggctttgtgaggctgcgccgcctctccaccgacgagattgtcgggacggagaagtccgccgggctgatagagcgttacttctcgctcatgcccgaaggcgacacgaccttgcaggacatcgacctctcggcaaaagaaatgcgtatcggtgacaaccgcctgtgcctgcacaccctctccgacgcggaggatatgccaggaaaggtggctaccgacatccgctacgagaaactctccaccgaccgctcggactgtcgcctctccttcgcctcccccgtggggctgctgctttcctgcaaccacatctataaccagtatgtgattatcgacaacagcgaggaaaatttgcagaagttcgagaagtccgcaaggaatatgcagtcgctatcccgatacagccggagcaacagcatcaaccgcgagtggatagaccagtacctgaacgaagcccattcctacgggctgacctcggtacgggcgcacttcaacgtcatggcgtggagcgatgacgcggaggaactgaagcatatcaagaacgatgtgggcagccagctggcaagcatggagtgcgtgccgcaccacaataccatcgactgcccgacgctctactgggcggcgatgcccggcaacgcggcggacttcccggcggaagagagtttccatacattcatcgagcaggcggtgtgcctcttcacggaggaaaccaactaccgcagttcgctctcgcccttcggcatcaagatggtggacaggcttacgggaaaaccgttgcacctcgacatcagcgacctgccgatgaagcggggtatcacgaccaaccgcaacaagttcgtgttgggtccttcgggcagcggcaaatccttttttatgaaccacctcgtgaggcaatactacgagcagggtacgcacgtggtgctggtggacacgggaaactcctatcagggcttgtgcgagatgatccggtgcaagacaaacggggcggacggcgtgtacttcacctacacggaggagaaaccgatttcgttcaacccgttctacaccgatgattacgtgttcgacgtggagaaaaaggacagcatcaagacattgctgctgacgctctggaagtcggaggacgacaaagtgacgaagacggagagcggcgaactgggcagtgcggtgaacgcctatatcgagcgtatcagggctgaccggagcatcgtcccctcgttcaacaccttctacgagtatatgcgcgacgactaccgccgcgaactggcggaacgtgagataaaggtggagaagtccgacttcaacatcgacaatatgctcaccaccatgcggcagtattaccggggcggacgctacgacttcctgctcaactccacggagaacatcgacctgctcggcaagcggttcatcgtcttcgagattgacagtataaaggaaaatcgcgagcttttccctgtggtgaccatcatcatcatggaagccttcatcaacaagatgcgccgattgaaaggcgtaaggaaacagttgatagtggaagaggcttggaaggctctatcttcggcgaacatggctgagtacctgcgctatatgtacaagaccgtgcgcaagtattacggggaggcaatcgtggtgacgcaggaggtggacgacatcatttcctcgcccgtcgtcaaggagagcatcatcaacaactccgactgcaagatactccttgaccagcggaagtacatgaacaagtttgatgccatacagtccctgttgggtctgacggagaaagagaagtcgcagatactctccatcaacatggcgaacaacccgtcaaggctctacaaggaagtgtggataggactgggcggcacgcagtcggcagtctatgccaccgaagttagtgctgaagagtatctggcgtacaccaccgaagaaacggaaaaagtagaggtttaccgtctggcggaacagttgggcggcgacattgaagccgtcatccggcagcttgccgaaaggcggagaaaaaaggaataaatagaaacagattcatcaactaaaaaagaaaatgcgtatgagtatatcaagaacgaaaatgctgcaagtcagcaagtgtttaatcgggctggcggtcatggtgctgcaatcctgcgacataacggacaaccgacgcgacctgctttgcgggaactgggagagtgtggagggcaagcccgacgtgcttatctacaaggagggcgaagcctataaggtgacggtattcaagcggagcggcatccgccgcaagctgaagccggaaacctatctcttgcaggaggagaacggcaatctgttcatgaacaccggattccgcatcgacgtgtcctacaacgaggcgacggacatcctgaccttctcgccgaacggggactacgtgcgtgtgaacccgaaaccggaccatccgataggcgagcaataaataatgaaatccactaaaatccaaagtaacatgagaacaagaataacacttattatctgcctgtgcctgtttgcagtcggcagggcaagcgcacagtgggcggtgatagacccgtccaacatcgcgcagagcatcgtgaacacctcgaagaacgtggtacacacttccacgaccgcccagaatatgataaaaaattttcaagagaccgtgaagatttacgaacagggcaagaagtattacgacgcactcaaatccgtgaacaatctggtaaaggacgcccggaaggtgcagcagaccatcctgatggtgggtgacatcaccgacacctatgtgaccagtttccagaagatgatgcgtgacgacaacttcacggtggaggaactgggagccatcgcctttggctacaccaagttattggaggaatccaacgatgtgctgacggaactgaagaatgtggtgaatatcaccacgctctccatgacggacaaggagcgcatggacgtggtggaacgctgctactccaaaatgaagcgttaccgcaacctcgtgagctactacaccaacaagaacattagcgtgagttacctgcgtgcgaagaagaaaaacgaccttgaccgcatcatggggctgtacgggaacatgaacgaaagatattggtagcctatgaatttcgacaaccttcaccaaattctgcgctcgctctacgaacagatgatgccgctatgcggggacatggcgggcgtggcgaaaggcatcgccgggctgggcgcactcttttatgtggcctaccgggtatggcagtcgctggcgagagccgaaccgatagacgtgttccctatgctccgcccgttcgctatcggtctgtgcatcatgttctttccgacggtggtactgggtacgataaacagcatcatgtcgcccgtcgtgcagggtacggcaaagatgctggaggcggaaacgctggacatgaaccgataccgtgagcagaaggacaaactggagtacgaagcgatgatgcgcaatcccgaaaccgcctacctcgtgtcaaatgaggagtttgacaaacaactggaagaactgggctggtcgcccggcgacatggtgacgatggcggggatgtacatcgagcgcgggatgtacaacatgaagaagggcatccgcgacttcttccgcgagatactggaactgatgttccaagccgccgccctcgtgatagacaccatccgcacgttcttcctcgtggtgctggcgatactcggtccgatagccttcgccatatcggtgtgggacggcttccaaagcacgcttacacagtggatatgccgctacatacaggtctatctgtggctgcccgtgtcggatatgttcagcaccatactggcgaagatacaagtgctgatgctgcaaagcgacatcgaacggatgcaggctgacccgaacttctcgctggattcgagcgacggggtgtacatcgtcttcatgataatcggcatcattggttacttcaccatccccacggtagcaggctggattatccaagccggaggcatgggaagctacggtcgcaacgtgaaccagacggcaggacgagccggaagtatggcgggcagcgtggcgggcgcagccgcaggaaacgtggtcggacgtgtcgggaagctgctgaaataatcaactgacaattaaaaacgaataaacaacaatggaatttaagtcacttaaaaacatcgaatcatcgttcaggcagatacgcctgttcggtatcgtcttcctctcgttgtgtgccgtaataacggtatggagcgtgtggagttcctaccgcttcgcggagcggcaacgggaaaagatttacgtgctggacaacggcaagtcgctgatgctggctctctcgcaagacttgtcgcagaaccgtccggcagaagcgagggaacacgtgcgccgtttccacgagctgttcttcacgctctcacccgaaaagagcgcgatagagcataacgtgaaacgcgccctgctattagcggacaaaagcgtgtacaactactattcggactttgccgagaaggggtactacaaccgcatcatcgccgggaacatcaatcaggtgttgaaggtggacagcgtggtgtgcgatttcaacggctatccctaccgtgccgtgacctacgccacgcagaagatcatccggcagagcaacgtcaccgagcgcagcctcgtgactacgtgccgcctcttgaactcgtcccgttcggacgacaatcccaacggtttcaccatcgagggattcaccatcatcgagaacaaggatttacaaaccatcaaaaggtaaacggacatgaagaaaatcaaaaaatcattttggcgtgcgtactggaagctccacgacaaaaagaaaatgctggtggcaaggctcaaaggctatctggacggtttgcccccgaagacacgcaggcgcatcgtgctggcgatgctcgccgcctttgcggtgcttgccctctacaccttcggcaaagccgtctatgaaatcggcaggaatgacggcagccggatggtaacagaccatgccggacaggtggaactgtccataaagccggacaacaatcataatgtaataccttatttatatggaacagacgaagaatgaacctaaaaacgagaacaaggcggctcccgacaacgggaaaccgaagaaggagcgcaagccgctgaccgaagcccaaaggctgaaacgtcagaaaatgatagtgctgcccgctatagtgctggtattcatcggtgctatgtggctgatattcgccccgtcttccgacaaggagcagcaaccgggaacgggtggttacaacatcgaaatgcccgacgctgacaaggcgaaccgccagatcatcggcgacaaggcgaaagcctacgaacagggagcaatggaggaacggcaggagaaccgcagccgcgccatgcaggaactgggcgatatgttcgaccgcgaggtggcggaaacggacggcggcagggacttcgaccttgctaatcccggaaatgcggaagatgcaacagcaaaatcatccgctccgaaaaccatccaatcctccgcagctgcctaccgcgacctcaataccacgctcggcaacttctatgagcagccgaagaacgacaacgcggaaatggacgaactgttggagcgtatcgcctcgctggaatcggaactggaaaccgagaaaggcaaggcatcctctatggatgatcaagtggcactcatggaaaagtcctacgagctggcggcgaagtacatgggcggtcagaacggtacacagccacctgtcggacaggcggcagaaccttaccatgtgcagaaagccggaaagaacacggctgcacctgtcaggcaggtaacgcatcaggtggtatcttcgctctcacagccgatgagcaacgctgagtttgtcgcctccttctcgcaggagcgcaaccgcagtttcaatacggcggtgggtgtcacgactgtatcggacaggaacaccatatcggcgtgtgtctatggggcgcagagtgtgactgacgggcaggcggtaagattacggctgctggagccgatggcagtggcggacaaaatcataccccgcaatgcagtggtggtaggcacggcaaagattcagggcgaacgactcgatattgaaattacttcgctggagtacgcaggtacgattataccggtagaactggcggtgtatgacacggacggacagcccggcatcttcattccaaactcgatggagatgaacgccgtcagggaggttgccgccaacatgggcggctcgctgggcagcagcattaatatctccaccaacgcaggggcgcagctcgcctccgacttgggcaaggggctgatacaaggcacgagccagtatatcgccaagaagatgcgtaccgtcaaggtgcatctgaaatccggatacaaggtcatgctatatcaggacagagattgaaaacaataacaatcaacgactaaaaaaacaacaaccaaatttttatttaccactaaaatccaaagtagaatgaaaaaagtaatcatcatgtttgccctcgctatgggcatcgtaactgccaacgcgcaggagaacgtaaccgttgtaacggacaacggaagtgaacaaccgaccttgacaaaggaggtctatccgcagaaggaggcggacggcgatctgtatcacgggctgacaaagaagctgaccttcgaccgcatggttcccccgcacggcttggaagtgacctacgacaagaccgtccacgtcattttcccctcggaggtgcgctacgtcgatttaggctcgcccgacctgattgcgggtaaagccgacggagcggagaacgtcatccgcgtgaaagcgaccgtgaggaacttcccgaacgaaaccaatatgtccgtgataacggaggacgggagtttctacaccttcaacgtgaagtacgccgccgaaccgctgctgctcaacgtggagatgtgcgacttcatccatgacggcgaggcggtgaaccgtccgaacaacgcgcaggaaatctatctgaaagagctgggtagcgaaagtcccatgctggtgcgccttatcatgaagtccatttacaagcagaacaagcgtgaggtgaaacacatcggctgcaagcgtttcggcatccagtaccttctgaaaggcatctacacgcacaacggacttctctatttccacacggaaatcaggaaccaaagcaacgtgcctttcgatgtggactatatcacgtggaaaatcgtggacaagaaggtggcgaagcgtaccgccgtgcaggagcagatcatcctgccgctccgtgcgcagaactatgccacctgtgtgccgggcagaaagagcgagcgcacggtattcacgatggcgaagttcaccatccccgacggcaagtgcctcgtggtggagctgaacgagaagaacggaggccgtcatcagtccttcgtgattgagaacgaggacttggtacgtgcgggtaccatcaacgaacttcaagtgcgctgaccatgagaaagcacatcgcaatcatcatcgcgtcgcttgccctcttcacggggcaggcgcacgcccagcggtgcctgccgaagatgcagggcatcgaattgagagctaaccttgtggacggtatgcgtttaagtggcaacaatggcggttacagtttcggggcggctctctccacctacacgaagaacggtaacaagtgggtgttcggtggcgaatacctcttgaagaacaacccgtacaaggataccgccatacctgtggcgcagttcacggcggagggcggttattatttcaagatactctccgacgcccgtaaaatagtgttcgtctatgcgggggcttcggctctcgccggatatgagtcggtgaattggggcgagaaagtgctgcatgacggctccacgctccatgaccgggacgccttcatctacggcggtgcgctgacgctcgatgtggagttttacgtggctgaccgtatcgccctgctcgccaacctccgggagcgcctgctgtggggtggcgacacacggaagttccatacgcagttcggggcgggcgtcaagataatcatcaactgacacgtcgcatggaacggacggacattgagaatatgaggcagatacccattgcggactttctcgcacggctgggacatgagcctgtccgaaggagcggaaacgagctgtggtatcgtgcgccataccgcagtgaacgcacgccctccttccgtgtgaacgtggcgaaacagctctggtacgacttcggcttgggcaagggcggcgacatcttcacgcttgtcggggagtttacccgaagcggggatttcatggcgcaggcgagattcatagcggaaaccgcccgtatgccgcttgccgcagcagaaaagccgttgtacctgccggaaccgtccgaacctgcctttgagggagtggaagccgtcccgctgctccgctctccgctgacggagtatttgaaggaaagaggcatcccttatgccgttgcatcccgccactgctgccgcctgaactacggcgtgcgtggtaagcggtactttgccgtcggctttccgaacgtgtcgggcggctatgaaacccgaagccgccgtttcaagggttgcgtaccaccaaaggacgtgtcgctggtcaaggcgggggacatcccggcggacgtgtgcagcgtgttcgagggctttatggacttcctgtccgccgtcacgctcggtttggcaacgggtgactgccttgtgctgaactccgtcgccaacgtggaaaaggctttgaaacatctggacgggtacgagcgcatcgactgttacctcgaccgagacgaagccggacgcagggcaatggaagccctgcggacacgctacggaggaaaggtgacagaccgttccggcatctatcaaggctgcaaggacttgaacgagtacctgcaacaagtatcaagaaaacaacaaaagaacaacaatctaaaaatcaaagaataatgaacatactgaacaacaagaacaagagaacatcaatcttcaaggcgttggcactctgcctgttcgccgcagtgtcattcacattcgtatcgtgcgacgacgatatggacatccagcaatcctatcccttcacggtggaaaccatgcccgtgccgaacaaggtcacaaaggggcagacggtggaaatccgctgtgagctgaagaaaacgggcgatttcgccaataccctctataccatccggtatttccagttcgagggtgagggcacactgaaaatggacaacggcatcactttcctgcccaatgaccgctacctgctcgaaaacgagaagttccggctgtactacacggcgcaaggtgacgaggcgcacaacttcatcgtggtagtggaggacaatttcggcaactcctatgagttggaatttgacttcaacaaccgaaacgtgaaggatgacggggttatcactgttgtccccatcgggaacttcaagccccttacacgatgatgcgtgtattcatggctatcctctgttcgcttctggcggtctgttccgtgtccgcacggaacagacgccatgagggaacggacgggcaggcggctatctaccggctgccaccatttgagagagcggtgcgatgcacgaagtattttgagggctggcattcggaaaaacatcacccgtatgtaggatatggacatcggttgcagccgggggaaagatattcggcacgcaccatgacgaagcggcaggcggacgcgcttctgcgaaaagacctgcggaagttctgcgcgatgttccagcagttcgggaaggattcgcttctgcttgccacgctcgcctacaatgtcggtccgtaccgtcttttggggagtgggaagatacccaaaagcacgctaatccgaaagctggaggcgggtgacaggaacatctaccgggagtatatcgctttctgtaactataaggggaaacgccacgccatgctgctcaaacgaaggaaggctgagtttgcgctgctgtatgtaccataaagaataagtgtctgacgaaagaaactccgatgaagccgccaacttcatcggagtttcagttttcatacattcgggattgtccctttgcctgcaacctcgccgtccctgcaatgctctatgataccgggtgaaaatcccatgctgccgattgcgatatgccggatatagtctgtatattcctgaccttgaaaattcctgcccgtaaggttcttgaaaaccatctttatgcttatgccgtcgttgctgtacaagatggtttttccgttctgtctgattgtttccatgattaaaacttgtttttgtgaatactatcgtagattggtacaaaggtttctttgcctactttcttatccgccatcatgctcatgaaagaaagtaggcggcttttgccgcccacccctcaaaagcgggtgtaaagtcccgttaccatcgtgaacatttcctccagcatatcgcaatatatcccctcgtgcgtttcaatgtccttcgtcctgctctcgaatgtctttttgctgaacgtcttgcggtagaaacgcatattgtataggtctgcccctccgtcatagatgatgtcaaggcggttggcactggtcttgttcctcgcaaggctcatgcgcaagccgttgcccatgtctgtgaagtctttgcttcccgtcatggcggcaaagcgtctgccgccaatctgctctaaaattgtctttgctatcatatccgttgtcttttaggtttatggttcgggcggtgcggacaccgccccaatgttcaaaattctgttttctcggttatgggtgtgcatttttccagccactctttcagacattccatgctatactcgctcgtgatgactgccgtatggctgtcaatggcagtgaaacggctgctttcatagctgtctatccacccctttagggtatcaactccccacgcttcggcatcgtcaaagatgccgtccaatgccgtaatgggttcgctgaatttgactatcagcgtttggtagcctgcttcgttcatcgcttctcctccttcctttcctttgccgttagccacttgtcccgtgcggctcgacattcgtctaatgtgggtttgacacaagagaaaagttccccgtccgtgtggcggtagtcgtattgcacaagggtgcgtttgcgtctgtcgatacccgtttggaatttctcgtagttctccgttcctgccgattggcaggtgcttactccgttaattgtcattttgttgccatagtcgttgttatttagatgattagaaatgtacagacagcactctgtgttgcatcaccatttcggggtcgctcgtgtagcgttggtgcaggtagaaatgatgagagccgaagccgtaaaggaagaacttgtcaagttcgtgtttctcggcaaagtctttgacgctagcccttaattgctcctcactctgacaaagagtgaggaggttcataaattcaaggaacatcgtggggattttatcatcccataggaaaaccatgctttcaaatcttacttccataatgttagttgttagatgtcgatattatgccgctttcatccgctggcggataaggttggcgttcttgttcacaagggcgatgatgcggtcgtggtattcggagttctcgttgcatacgccacgacactgcaccacctcaaaagtttttagtgacacctctatcgtttcaattcgttttccgtcaatggtggcggataggataagggagtcttttcgtttgtggtaaccgcccacacaatggtgcatcgtccttccttcctctgccatttcttccacgctctctatgactttgacgcaaataaggctgtcggtaaaggcaagtccgaagaatatgcccttagctttcagatattgtttctcgtcctcaatcgctttcctgcgttgctgttcagtccgctcatgtttcctttgcaggttgcgctttgccaccaacttgtcgtgttcaactttgaggtcggcagggcaaacgtatttcgggctgtttgtgtccttgccgaaatgacgcaggaggtctatggtgtcacgccacattgagccgtcctcaatagtatagccgttgcggatacatatcttgattgaagcccaatactctccaatattgaaagagtggtacagatagtagcgcaacatgggatattgccctgccttcaacagcgtttccgcacggctgtccgacaataatgccggtattagtttggtgggtacaatgtcgtggaaattgccgttaaagccgtttctgcggagcgtcggcaacaccttatatcttggatatatcggggaatatgagatatggcggtacgcttcattgtcattgcggatagcaaaaggagaagcgaatgagaacgtgtcgatgtagcatcccaatgtgcgtggaatggcaacaacagccttacgcccttgttcattccaccaatactgcccgatttcaagggcataggacttggcattaacccctttctccatacccacgacaagcaagaacattcgtagcacttggtattctccgcttgtggtaagggttgtgaaatactgcttttgtcttaccttgcgctgataggtgaggcagactttcaaacttgctccacattcgggacacgtacaatgctcggtctgctccgtcattacccaactatgaccgcaatccatacaagtggtacgacctttcggcaagcggtgtgcataatgctccacgcaattacggaatgcccaatttatctgtatcggggttatcgggcgtagtttcttgctttgggcaagaactgctttttcaaatttgtttctcggtttcataagccaaaatcaaataatgagggttgaacttgggtttctgttttcgcctttgtcggcttggtgcggttctgcaacttgcggagttcctcgtcttggtatctgcggactgcctgctgacgtgcttctgctttttcctctgccgtgagttccacaatgtggttcaccgccacttggcattggataggcttgcccacctcaatctcgttctcgtcatagtagtgtactgcttgtccgtatatctctccgtccgtgaagccgttacaaccgcttttctgcacatagttcagaatgtaggttacgcaatcgtcaatgttcttggctggattgcggtagttcttcgcaaagagcgtgtcttcctccgcacgttgttccaaatacatctgtatcgttctcttgaaatggtctgttcctttcatatcgctgtcgtttttatgagttgtcaaatagtatgtttcaaaatctccctccaataaatcggctcaacctcgctcaataggaagtctataaagtccttccgtgcgttcttgttcagttcgtggtagagtccacggaacacggacatattgccgttgaggtatgtttccaccatgtactcgaagatgttgcccacctcgtagtatctgcattgttgctccactgtcttgcttcttctctttgccatgtcggtagggattaaagggtgaataaccaaagaatgaagccgaagaacaggataacggaaagaatagccacgattaaccctattgccactcggaacactccgtttattatctctctgacgatgtaccaaaggatgccggacacccaaaaggcggtgcgcatgattagggtgcatatcgcaagccctatgtattgcgccatttgtctgaaatttaccgttgctgtcatagccgtatcatttgttaagttccacgatgctgtctatcctgccgtataggaaactgcggagtgcggtcttgtcggtagccttgtattccgcccaatgtccatactgctttacaatgtaggttcggagaatgtcggaaaagtcaaacatccaaccttgcaagggtactgcgctcttgaaataggtgttgctgttcacattgcgtgtaagccaatccttttcctctcggctcaatttctcaccattgttcagtttggtgcgaagtccgtacaccttgctgccttgcaggttctccaaacttggtacttcccatgccacgaattttgttgctattgccgttctcatatccgttttgtttttgattttttgttttttaatgcggattcaagagctgagggagttgagtttcaaactatcttatctgcctctcgtttatccgacattttttttaatgcgtctttctgtcgcatcggtcgttttcgtttcgggtgcttaaaaaggtagggattagggaatgcaaggtttttcgggaaaatactacccgaagggctggagatttttccagaaaacaggaggcttgaccttgctttcccgtacaatcccggagttacctttgcacccagcacgaaaatgactgcctgatgcggctcactgaaaggcgcgaaaatggaggtaaacggaagtagaggcagattagacaggaaaacttcaaaagagaaatccgtgaaaaagacatccccaacagaaaagaacatagccggtagcgtgaaaccgggcaaaccatcggcaaggaagtatgtttttatctgtttggccaaacgtgtttggtcggatggataaaatcattcttcccggtttgtctgccgtgagtgacggcttgttccatttatggaatgtgcggtcatacacggctttccgcttccggctcaaaaggacaacgaaaaaagaaaaatcgtcaaaaccccgtaaaagcacctctttggcataagcacaaaagaaaggggccttgtctcatcagtctaaactattgtttaggcgtgaggcaaagcccttttctccgcttatgcggcagtcggcacacgttcgttcaaaatctttttgggcgatggtgtgctgacggataaaatcgcttttacggaaaaacttgtgtgagaagaaaaaatcaggagattcatttctaaatctcccgttttattgttacttttgcatacgaagagttctttgaaggttacgcaacgcacagaagaataatgcagtagataactaactaattcgtaacctattactattatgagcgattacccaatgctcatttccaataaattacactcttttcgtaacttctggctgcaaatgtacaaaaatctcttgtatttatatctttttattctgccattttgcttttttgagataaatataactcgttatcaataacaaggtatagtacacaatctcaatggtaaagcagatttcaatcggtgctttgagccacatcccgatgaaaatgatatacgagccgtaaatgataattgtaattgtttcgagcagtaaggcggcttgtgtgtttcctgtgcccgagataccgttgaacacaacattggctaccgatgcgatgagcatggcgatacaaatcacatagactgaagggacggattctgcaatcagtgctgcctcactggtatagacggacaacagtagttgcgggaatagtgctgtgactgctaccagccccagcataataaagaacgagaatctcgcaattttattaataagcggcattacgtgcttgatacctcccgcaccgatagcattactgacaagactgtttgtggtggttgccagtgaattgaccggaatcagcaatacgacgtagatactccggactatgttggcaatcgccagttcccgttgtcccagccgttctacggcaacaaagaatacgaaccatgtagccattgacaggaagtattggagcatggtgaagcaggaaatgctgagaatccgcatcaacagtgcagggtcgaacgaacgcagacggttcagtccgtatttctttaagtcgatagtgacatatgtgtagatgaggaagaataggatagaggaggcttcggccagtacggaagcaatggcggctcccttgatacccatttcgggcagaccgaatttcccgaagatcagtgcatagtccagcacgacattggtcaatgccatgacgactgcgttaatggtcagcactttagtacgtgtgattccgatatacaatgcccggaacataacattgacgaatgagaagaagaatccgtagatacgccagtccagaaactccattgtccctttgtagattgattccgaggaaaccagcaaccgcatgatgttgccgccgaaagccttggtgaaaccgaagagtagtaatgccattacaaataggaacataactccctgaatcatcaccggacctacatctgtgtagcgtccctcaccgttacgtctcgcaatgacgatttgcgaaccggtactgaatccgaatgcgatggtgaatacacatatatagaatagtccgcccatagcagaagctcccaaggcaacttcacttacgtgacccaggaacgccgtatcggtgacattgatgacattttgtgccagcaagctgagtagtatcgggtaactgacactccaaatctgtttgttggtatacatattaagcgtttaagtttacattttgcaaagatagcgctttattccgaatcggaagcgatcgggtaggtgaaaacaatttccggaccctccggggtttgggtattgatttgataggttcctccgaaatgtgtcagcaataattgattgatttcgtgccggatgacagtttcctgtgagacaaaggtagtatccgccaacggcgaattaatgatttggaaatgaagcatttcatctttccggctgagtatgaaacggatgacgcgttcctgtttttggtcttgctggtattcatacgggtaaaccagtgtgctaagtatcatctgtgtcaggcgggcggtatctgtgcggacgggctgtgacttcgtttctgtgtagaatcggacttggatgcctgtcgtttcattcttcatacgtgccatataacatgcttcgttgcatagttcgacagcatcgtaaacttgtatttggaatttcatcatttgagcttccaggcgtgataagtcgagcacatcgttgacaagtctcattaacttttcagagctttggtggattatgttcgaatattccttccttgttccttcgtcaatattcggttcgcacgctatgagttgcgagaatcctactacgttattgagcggagtgcggatgttataactcatgttcgaaagaaagcggttctttatttcattcgtttcccgaacggttgcggcggctttgcggatttcgttttccgaacgtttcaatgcctttcgtaccatagccagacggaacatgaaaatgaataatacaaataaaacaacgataatcacagccagaaagatgaggcgaatccggttgttgtgccgttgttgttccatattgattttatccagttgataactgctctttatttgttccatttgattgtttgcaagcgacatggaggcggaatctttaatggcaagtgccttctgatatagtggaacggccttttcgctatcgccggcctttacccatattttagctttcaccaataactgttcggcatagtcgctggcatagttgtctttcagcatgactaatgtggtgtcgatataatctgaggctttttgatattcaccgatatatttgtaatatctggcgtaggtgtcgaaataaagtacctgatacatgaaatagttgttctcgttctgatattccttagctttcaccagatgttcataggctctttgcggctgttgggtattcaggtaataataagcatagaacaattcgttgaacagaaatacgtcagagaaaccgtctttaagagaaggattttccttgatatgtttatagagtgtgctttcgagttcttgcaggtatttaaacagcttgctgttattcttcatttctttggtgacagataccaattgcgacagtaccgagatgcgaactaccggattagcgtccggagcaagtagcttgtaggcttcttccagtgctttgatgccttcctcccaacgttgactgccgatgtaggcattgctcagacactgatgagcggctaccagtccccgatgattgtttttttcgaaagcttgttgcttcatcttgtttgcctcgctaatggcacgctcgtattcttcgttgtaagtgtacaagtcgatctggaaacgtttggcgtcgaagaaataatcccatataccggatttgtggacgtgtggttccatttgtgtaatccatttcgctacgctgtctgttttgttgtggttataatagtacaataggtgataataggctgccagtcctgcgtatttatcatccttctgaaacaatgcttctttcattaaagtgtccgagaactggatgcatttaggattgttctgttctattcttataatgttgtttaaagctacaagacgggttgagtcatgaggcaggttttgaaacacctgtatcaaactgtccgtgttcatttcataatcggcttttccgacaagaaagcagcaacagactatgtgcagtagtattaatcgtttcatcttgtttcctcctttccttggtcgcttttgtcaataggatgtgtaaacaagaaacgtgaaccttcttcgtaatcggggtcgatccagatactacctcccagttgttcgatgatgagttggcaaatcgatagtccgagccccgtaccttgggcattttcattgagcttctcgaaacggttgaatatctttttctgtttttctttagggattcctgtgccggtatcggtgacagagaaaagtgccgtatcttccgtttgttgctcaagttgcagagtgatagagccttgtgaggtgaatttagttgcattgataagcaggttgatcagtacctgttgcaggcgggcactatctgtcagtagttccaaggaatcgagaggagtggagaagcggacgtctgcatgggtctgctttatcttttccaccatatcaatgacgtttctgcatagtcctactgcatcgcatattttgaacttgaatgtcatctttccaatttcaaggctggataagtcaatcacgtcattaatcaactttagcaacagttccgaattttgctggataatatcattgcactgtttcctcgtttcttcatcaatggattcttccgtcagaatggtggaaaagccggataaggcgttgagcggagtacgaatctcatgactcatgttagagagaaaaaggcttttagtgcgaatcgaattttctgcctgtttctttactttttcttgttcttgttgcgattggatcagacgtttgttgttccttttgatgcggaagatgaagaatataattaaggagaggacagacaggataataaaccagctccagtataagattttcttttgcctgtttatgttgtttaattcattcttgtcaatctgatagagagtatgcaattcattgatctggcgcagatagctattggcgtcaagtgagtctttgcgtgcgttaatcacttcatattcctcacatgcttcttcgatacgtcccattaatgaaagaacttttgcccgttcttgtgatatctgtatgtctttgtacgaaccggattctttgacgtatggcagtaattcatcatacgattgcaatgcctgggtatattcttttgcggcgatatggtaggaagcatataagtatttgattaacagaagaaaatatggatacggatgtttggcatagattcgctccattttttgcagatgttccaatgccgaagggagtttgtctgactgtatctcataaaacgcacggcaacagggaagataaaaatagcaaggtgaatcgggccttttgtcgcaaagagcttccaggtagttgatatctttctcaattcctgccatttgccggttattgagcttaataagtatcatttgagataatgcgttttttaaatagatgtcggcttcgggtatctgttgcataatctctattgcttcttcataagaacctatggcaacttgtggtgttgatgagcttaaatatgtatttccgattgcacgtagtgcaagagctgttcctagcgggtagtctatctctttagctttcttatacattgaattggcgttgtcaatagccaggctgatatttccttctgttattgatgactgaaccgccattgctttgagttggaataagatgtcgtatcgttgctgcttttcaagttcaggtgttaacagcttctcccataagataatactgtctgtggtgacgccggtgttaaaagcaaggtcatactgaatgagcggctgtaataaagacagacgttctgcattagtatgtgcagcgtacaatgttaccgatatgaataccgttataattgtagtaattatgtggtgtaagtttctattcaccggatgtttgtttgcaaggttttatgcaaaagaaacaaaaagagcgaagactgacaagaatcttcgctctttttttctaatttattttcttttgataatatcacgtgcgctagggccttcgtggttggggtagccgggagtatgatttctgcatctcgggtcggcgtctactttcagactgcggtaattatcttttgaccgggtgatgtagtcgtcgagcatggcacggtgttctgcaagaaccttggcatatttgggattcttggcgaggttcttacgttcacccgggtcgttcttcatgtcatagagttcttctccgttgccttccaaataatgggtgtacttgtatctggggccacgtaccatacgtccgggagtaactgtgtattcatattcactatgccattcggatacaacatatggatgagtcttcttttgtttttctccttttaatgtcggtgcgaggctgattcctgccttttctgcgggaacaggaatgccggccaggtcacagagggttggcaataagtctagtgtaggctgcgtgagtaagtggtctaccggttttttctgatgcttgataccgggacctgcaaagataaatggtacgtttgtcatttcatcatagaaactgatgtgcttggtcaccatacggtgtgaagtcattccgtcaccatggtcggcaaggataacaacgattgtgttctttcctgcgggggtggagtataatgctttcaaaacactgtctacttgtttggataccatttttgtatagtgctggaaagcggcgatgtaatggcggtaattttcctcactccaatgggaggcttgcgtcatacgccggtggctgcaacagatgtattgcaccggggtaggtatgttgttccagtcttctacatcgaaattgtcgggcagttccgggagtgtgccgctgacaggtcggtcagtatgtactccttcattttctcctacgaatccgcagatattatggggattctgaaaatcggcaatgcatatgaaaggtttttccgaaggattgcttaaataggaaacaacgtcctcgcaggttcctacgtccagaaaactatcattattgaccggaaattccgggtcggtaaatggctttgctaccggctctttatgtttgaatcctcttaatgaacccatatcgtgcgtttttccgaagtgtacagcttcgtaaccgttttccgaaaaaaggcttcctaatgtcggaacgttttccggtataggtgtattgatcggttcgctggagttggagcgtacgttagtttgatgaggcatcatgccactccataaagcggcgcgtgacggttggctgagggggcagcctacataagcattggaaaagataactcctcttgaagctacttcgtcaataggaagggtgcaaccttgtgtatgaccgtaggcgccaacgacgcgttgtgtaagatggtcgcattggataatcagaaaattgggcttttcttgtgcttgggctgctatgccgcaaagagccaatcccatgaaaggataaattgttttcattcttggttagaattaagtgatacttgattttgaagcaaaagtaggaaaaaagggaaagcaaaaaaggggggaatacttgttttggacgcaagtgaaagttttttgtacaaaattggaataaatgacgggtgataaaactataaacggtgaacaaactgcgattataacgcattctgttcaccgttcattatttatggtttactgctaattagctgttcatgctcatcaggaattcatcgttgtctctggttttttccagacggtcttttacgaagtccattgcttcgatcggattcatgtcggcaagatatttacggagaatccacatacggtcgagagttgtcttatcaagtaacagatcgtcacgacgagtactggatgcggtaatgttgactgccgggaagatacgtttgttggacaggttgcggtcgagttgcaactccatgttacctgtacctttgaattcttcgaagataacttcgtccattttagaaccggtatcaatcaatgcagttgcgatgattgtcagtgaaccaccattctcgatgttacgggcagcaccaaagaaacgtttcggcttatgaagtgcgtttgcatccacaccaccggaaagtactttacccgatgcaggagatactgtgttgtatgcacgtgccagacgagtaatagaatcaaggaatataactacgtcgtggccgcattctaccagtctttttgctttttccaatacgatacctgcgattttcacgtggcgctctgccggttcatcaaaggtagaagcgataacttcggcattgacgctgcgcgccatatctgttacttcttccggacgttcatcgataagcaacataatcatgtatacttccggatgattggctgcaatggcatttgcaatgtctttcattaaaattgtcttaccggttttaggctgggctacgattaaagcacgttgacctttaccgattggagcgaaaagatctactacgcgggcagacatggaatccgaataaccgcctttgcagagtttgaacttttcatccgggaaaagcggcgtcaggtgttcgaaaggaacacggtcgcgaacgaaagcggcgtcacgtccgttaatcttcgatacctttactaacgggaaatatttctctccttctttgggcgggcggataactccttctaccacgtcaccggttttcaggccaaataacttgatttgcgactgtgatacatagatatcgtcaggagaagaaaggtaattataatcggaagaacggaggaatccgtatccatcctgcataatttccagtacgcctactccattaaggatgtcatcgaattcgtaaggcttttcacgctcaataactttacgttcctgctgctgttgtggtaccggaagattttcgttcgcgttgtttggctgggcaggacgcggcatcggtacacgctgctggttctgattttggttattgttacgttggaagttattattgttattattattggcgttattgttactattgctagcattattattgccattattgttgtcacgcggacggacaatgcgtggacgttgttgctgttgttgttgatgagcctgttgttgtggctgtggtgcttgttgttcggtagcagtttgtgccggttcagttttggtggcttcgaattttccaaaaagttcggtgggaagttctatcttttctgaaggcagatcttcgataggaataaaatcatcgtcgtcggcaccggataagatattgctttcttcgtctataacgggttcggctttcttttgcggttgcggtttcactactactttcttctcttcagcaggtttgttggcttttgttttcttttcgggagcttgtgccgggactgctttttctattacttcaggagctttctcagtaactactttatcttccgttactttaggagttgccggagttgcagttttcacgctttcaacttctttttgctctgctgcatcggcatttttacgcggacggcctactttacgtttaggagctgcggtattttctgctttaacttcaacagcaggagtctctttttctttatttgcactttcctcttttttagaaggctgttgtggcttggcaggagcagcttctttggctttctcagcttctccttccttggttgcggaaactactttgttatctttcttggcaggcgctacgcgtgaacgctttttcttttgttcttctttgcgttcttctttaagcttgtctgcggcaactttctttgtggctccggcgattgcttgttcatcgagtattttgtaaacaaggtcttccttttttaatgagtctgttttttttatgcctaactctttggcaataacttgaagttccgacagatctttgtcgtttaattggataatgttatacatatagtatggtaagttattaatatttcttttttgctgaattatggacagcattactatgactctccggtcacagatatgcgagcatacgttttgtttttattatgaattagggatgtatatgttgaatcgtagaatgtttcaacggggcaaagataataaatttttttggtttcataaacaatcaaacctttttttcaacgtaaaagtgtatctttgctacataaaagaaaatagtatgacagtaaatgaagctcatttaatttatttttcgcctacacacacatcaaaacaagttgccgaggcgattgttcacggaacaggaataaaaaatattcttcctgttaatgtcactttgcagactaccggggaagctgtaattcctgcatctgcattggctattatcgtagttcccgtatatggaggccgtgtagctcctttggcaatggaacgtttgcagaatattcgtggcttggatacacctactgtgttggttgtggtttatggcaatcgtgcttatgaaaaagccttaatggaattggacgctttcgcccttccccacggattgaaagtgattgccggcgcaacttttatcggtgagcattcatatagtacggatgaacatccgattgctgccggacgtccgaatgattcggacctggctctggctacggagttcgggaaaaagatcatagaaaaaataaaaacggctaccggcccggatactctttatccgatagatgttcgtgctatcaaacgcccgaggcagcctttcttccccttatttcgttttttgaggaaggttatcaagttacgtaaaagtggcacaccgcttcctcgtactccgtgggtaaaagatgagagtctgtgtacacattgtgggttgtgtgtggttcattgtccggcgggtgctattacaaaaggcgatgaactaaatgtagatgaaaccaaatgcatcaaatgctgtgcttgcgtgaaagtctgtcctaggaatgcaaaagtgtatgatactccttttgcggctttattatcggattgtttcaagaagcagaaacagcctcagactattttgtaaataacaacgcgtttcgttgtttcatcaatacggaagcggttatctattcgttcgcctatcagccatgcaatgcgttctccgcaacagagcacccattgacgctctttctgactgatagaaaatttgcggtcggtcaggtaatcgcttatttttttcttgcctttcattccgaaaggaataaaagtatcaccgatttgccatttacggtgatagatttcttcattcaacttgtcagcgtcaaaacatgctgttcctttttcccgtggaatctgaaaatttgacgtgtattctttctcttctttaattaattgaaaaggggggatgtctttttcttcagaccggatttcttccagtagcaaaaattccctgtctttaatcactctccattctttgctggcaaactgttttcccgattgtccatgaagtgagtttgcaatatctttgatttgtgtggagttaaagccgagtggatgcagagtctcgaataaaatagtttcgggtacagcttcttttaacaaattgctgatccggattccttctggtgtgactattcttgcttttgtttttgctatacatttattgtatatagtagctacatcattcagataattactcgtctccaccagactattcttgacggatggattaatctcctccataagtggaaggaggttgagccggatcttgttgcgggtgtattcatcttccagatttgtactatcagttacataatcctgttcaatgttttgtaaatattgaatgatctctttgcggttgacacaaaggagtggacgtacaatagctccgtttcgaggacggattccgagtaatccggtgattcctgtgccacggattagattgagcaacattgtttctatactgtcgtcctggtgatgagcaacggcaatgacatcggcccggtatttatttttaatttcttcaaaccagttataacggagttcccgcgctgccatttctatcgaaatatgcttttcggctgcgtattgggttgtgttgaaatcagcggtatgcaatcggatgttgtatttcaggcagagttggcggacaaatgattcatcgcggtttgattcctcgccgcgtaaatgaaagttacaatgtgcggcttcgcagtgataacctgctgtgtggagaatacgtagcagtgccacagagtcggcgccgccgctcaatgctaccagaattttgctgtctgatgaaaacagatgattcttttctatatattgtgtaatccgttgctgtatcatgtttgcaaagataatagtttcttgcttagtcttttgaatttttcaggaacttctccttctgtttcctctttttctgattaccagatcttttttagtgaggaggtttttcgattagaaatgactcttatttaaaaacaatctaaataatttgcgtgctccgaagttatgaattatctttgccgaaaatttagagagttatgcgtttgtccgaattaacaacaggcgaaaaaggtgtcatcgtaaaggtgctgggacacggtggttttcgtaaacgtatcgtggagatgggttttattaaaggtaaaaccgttgaagttttattgaatgctccattgaaagatcccattaaatataaagtcttaggttatgaaatttctttgcgtcgtcaggaagctgagatgattgaggtagtcagtgaagaagaagcaaaaaaacaagccggcgaaactatttatcacgaaggtttgcctgaagatgtttctgtaaaagaagaagatatgaagcggttggcgttaggtaaacgccgtaccattaatgttgccttggtcgggaatccgaactcgggcaagacttctcttttcaatctggcttccggtgcccatgagcatgtcggaaattatagtggtgtgactgtggatgccaaagaagggcattttgattttgaagggtatcattttcgtattgtagatttgccggggacatattcgttatctgcatacacgcccgaagaaatttatgtccgtcgtcatattatagatgaaacgccggatgtgattattaatgtagtagactcctccaacctcgaacggaatttatatcttacgacgcaattgattgacatgaatgtccgtatggtggtggctttgaatatttatgacgaattggaatccagtgggaatacattagactatcatttgctgagcaaactgtttggagtaccgatgttacctactgtcagtaagaagaaccgtggattggataccttgtttcatgtcgtaatcaacctttatgaaggcgtcgatttctttgataaacaggggaatatgaatccggaagtattgaaggatctgaccgaatggcatgattctttggaggaccgtaagaatcatgaagaggaacatctggaagattatgtacgcgaacataaaaggaccgagcgtgtgttccgccatattcatatcaatcatggacctgatttggagaaagctattgaggctgtaaaagaagaagtttccaagaatgagttcattcgccataagtactctacccgttttctatcaataaaattgttggagaatgatccggacatagagagttttgtacgtactttgccgaatgcggaggaaatcctgcgtattcgtgataaaatggccaaacgcgtacaggatacgatgaatgaagattgcgagtcggctattacggatgcgaaatatggttttatcagtggtgcgctgaaagaaacttttactgataatcatttggaacaggcgcagactacaaaagtgttggattccattgtcactcaccgtatttggggatatcctattttcttccttttcatgtatctgatgtttgaaggtacttttgtgctcggggaatatccgatgatggggattgaatggttggtggaacaaataggcgatttgattcgtaacaatatgacggatggcccgttgaaagatatgttggttgacggcattgtgggtggtgtaggaggcgttattgtctttttaccaaatattctgattttgtatttctgtatttcattaatggaggattccggttatatggctcgtgcggcgtttattatggataagattatgcataaaatggggttgcacggaaaatcgtttatacctttgattatgggattcggatgtaatgtacctgctattatggcttcacgtactatcgaaaaccggaaaagtcgtctcattacgatgttgattaatccacttatgtcatgtagtgcgcgcttacctatttacttgttgttggtaggagctttctttccgaacaatgcgagcttggtattgttaagcatctatgcaattggtatttttctggctgtgctgttagcacggttgtttagcaagttcttggtgaagggtgacgatactccgttcgttatggaactcccgccgtatcgtatgccgactgcgaaatcgatctttcgccatacatgggaaaagggagcgcagtatttgaaaaaaatgggcggaattattatggtcgcttctgttataatttggtttctgggatattatccgaatcatgatgcatacgagacagttgccgagcaacaggaaaattcttatatcggtcagttaggacgtgcgatagagccggtgatagaacctatggggtttgactggaaacttggaattggcttgatttcaggagtgggggcaaaggagctggtggtaagtacattgggagtgttgtatgtcgatgatccggatgcagattcggtaagtttggcagaaaggattccgatcactccgttggtcgcattctgttatatgctttttgtactgatttacttcccgtgtattgcggcattggctgctataaaacaggagtccggtagttggaaatgggcattgtttgcagcttgttatactacggtattggcttggcttgtatcctttgccgtttatcagattggaggattatttgtatgattaattggcaggaatgggtagtaggagtactggtagtactctgtattgctcgtattatatatggaatctttcttttttttcgtcgtacgcgagaaaataaaaatccttgtgacagttgtgtaagtggctgtgaactaaaggatatgctagagaagaagcgtaaagagtgtggtgtaaagaaaaaaagtacaaagaaaaattgctgtggatagttggtaatttcaaaatttgtactacctttgcaaccgcaaacgagaaaaatggttccttggatgagtggcttagtcagcggtctgcaaaaccgtgtacggcggttcgaatccgccaggaacctcggagaaggttaatatgccggatacagagatgtgttcggcatttatttttattgatattcagttgattaactaccttctcttttgtgtgacaagctgtgcaggtgtagaccggtgtcaattcttacctgcaaaaggaaccattgtagctcatggtaacgataaatatatatctgagaaaatacggaagcgagccaacatctggagtcgtttggttgtctttttatatcaatcgtgaaaaagtaaacttttctacgaaagtatcagttgatatcaaaaactggaatgacaagaagaaatgtgttggtcttggggataaatcagctaatgacaaaaacttgatcattgaaaatattttggcaaggataaacaatgtgattgtgaaatatcgacttcgcgacagaaaactcactcgtgcatcttttctcaaggcttacaaccgtccggacgattataaaactttttttgagttcgttagtgagtatcaaaaaaaagaatcattgaaattggaatattctacttttaaaactaacctatctgttataaagaagttaaaggagtataatcaggatttgcattttgatgacattacgaatgaatggcttgatgggtacttctcttatctgatgcatgatcttgataacaatctgaatactgcgtttaaaaacatggccactatcaaaaaatatgttacggccgctcataatgccggttatatggacgacaatccttttaggagctggaagataaaaaaggggttgccttcaggtgaatatctgagtgaggatgaactccaaacactaatgggaatctatattaatggagaactggattataaatatcataaagctcttgaattttttctttttttatgtttcagttctctgcacattggtgatgctaaaaaattgtccttagaacagtttacggatgatacatttacctactttcgaataaaactgaaaaatagaaagccatttccaattcaggtgccgatttcagaccctctccggcagttattgagaaatatatgtgggaccaggaagaaaggaccgctctttgaaaagttgccgtccgaccagactatgaacaggtttttgaaagaaatagctgctattgcctgtatcaaaaaaaatgttactcataaagtagggagacatactttcgccacaatctttttgcggaaaactaaagatatcacttcgttaaaagaaattcttggccattccgacttgcgtgaaacattggtatatgctcatgtattgaatgagagcaagcaggaaggggtacagtgctttaactgttttaccttttaaattgtacttttgtacgggaattgcttattgtactgataatcaaagaataatggacgcacttttttgtactaaattgtacgaagaactgtgcgcccgtactatttatggccgtataacaacagttggagtatatccgaattcaatagcagcatcgaaacaggggcaggatttaatccattcgctaggctctacgataccattatcgttcaaatccggagatgtatcccgatgtccgagtacttctataatattgaactgttttttgagtcgggatactaattccacgagtgcaatcttttgtgctggagtacgtgtgtctgcaggttcaccgttgacatttagtcctccgatatagcatacgccaatactatgtttgttatatgacattccagaagagccttttgtattacaatgagcacctatcatgctgagtggccttcctttttcgatagtaccatctaagtcgataacgaaatgatagcctatcatgtcgaagttgcgagcacgatgcattcggtcgatgtcttttgctttgagattttgcccggcgcgcgtggccgaacagtgaatgataattgaatcaatagtttccatttttcctttccgcttttaaatattaatactacttttgctgcacaaaggggatatctcctttgttatatttgtgtgcagccgtcttactcgtgatgaacaggacggctttcttttactccattttcttcgtactttgggaaagttcattttcttttataggtaactgataaccaattgcagaaaagtattaatcggcggggcgtcctattacaacaactcgaaaatctatattcataagccccttattggcatcaagtgtctgtatattaaaatgatcattgtaccgtccacactctatacctatagtccaacgatcgccatcgactgcccagggagtcgtttgtacaattacaatataatcagtatgcccttgtgagtgatataaggtatattgtccggtacttgtgcgttgtatgcgtgatattatcattccgtcaccccacctttggacagaatttaaatctctttcaacagcaacaaaaccaaggactccgggcatactccaatggtcgttcttgtccattttccagtcaacgccaccaatagcgtcaatgcataaattacaataccccccaaacatcatatcctttctcatcgtactaccactggcgcgaagcatgagtgccctgttgaaagagttccaatttcctgtagcggacatataagcagacacgtcgaatccgaccatggcggacaatgtgtttccaagtgccgcttgcctttgatgatcaccaaaatccgtttggacggaaattatggcatctcgtccgctaatgtttttaagcccggatccttcaatttcaaaaccaccaataacgccgtcatttgcatttaccgttccagtaaaagttcccttattcgcgaacacctctcctttgaatttgtactttttattgactggatcaagctcgaacactacttcatcatcaaccaatgcgaatatcccggtacgcttcgtcccgtcagctccggtgagacaatcacgtcccatagcgacgcctgtcagcttcccgttactgtcttttgtgccggaaaacatcttgggagacaccatatactcacctcctatttccgtcttattattgttccattcctcaatccacggaagaaggttcgcatcttgaccgtcttttcctctgaatctgataggagtgccccattcacctgaatctgcactatctgcaaccttctgtgaaatccaaacgacggatgccgttgaatttgtatgccaaccttcggttgtaccattccctgtaggaacggcaggttcggtttcgctgtcatgataggttatgtaaactctcataccatccttaccgtttgtaccgtccgtaccgtccaggccatctgccaccattaattcccaagctgtgccgttatagatgtagacacgcccgttgtcagtgtcacgatacacccagtttttaacagggtcagctggagcggcagacaagtcacctttccatacaatgtccagaccatcctttccgtcattaccgttaattccgtccaggccatcctcaccgtcaacggtcattacataccaagcattatcttgatagacatagttcttcttgtcggatgtattgcggtaataccagccgttctgaggattggagggatgagaagtgaactcgcctttatatacaagactgctaccgtctttcccaggttcgcctttcaggtttttttttacttcactatccaagttatcccaagtaagtttcacgccacttccgaaatggaagccgtcagtgtcccaatatatagccctgttgaatatgtcaccgttaccttccttgtcccatctgatattgccttttgcaatgaatccggaactgtcgggattgaactggtacaggattgtcccgtcatcgtctacacctttcagcataccgttgacgcaatagaatcctttcaatccattcgttcccggtatatcaccgcccacacgaaccttcaggcagttgctccagtcctttgaataaataccggccagcacgtcaatggcaggctgtgcattttcatcagcgtgcatatagatagcggaatgccttcctgcgtactgtgtttcgtatgaactgttaccaaattgcactatgtcgtccccaacggaagggggattagagaccgacacgtgccccgattcatccgccaccgtttcaaactcgctgaccgggatacggataaccccgtcagcaacggactctatctctacatgataagacttctgatttcccgtaaattccttatagcggataaagtcatgctccacaaagctcatatccttatcctcaatcgtgataagataatacaggccgtcttccgacaattcagcggtctttatttttccgcatccttgcgtgatggcctgcgccccgataatagcgcgtatcttggatatcagcaactcaaacaccgtgaactgtccacgtacacggatagcgtcaatttcaagcatccacttgcccttgacatattcccaaattttccaaccataacccgaaaaaccggataaaaagaattctacgattttctcacccatctttattccggatgagataaatccgacaattgccgaactggataatcctgccatattataatattaagatagttttgtaacttcgactatacagattggggatattctggagtaaccgggttctgctgaaggatcgttattataaccttgggcaactaacagataaccatctgaatccactgctacatcgtcgaatgtataccaatcagaattattgttgattactttagtagacaagtcggatgctaatacttgttgcacagcattttgaacgtataaattccaaggttgggtattgggtacagaatttttgtctgataataaaagtctgaccttatagttacccggagttaacccctttaatattacgacactttgaatttcagccgtgtaagaagtgaaattaccacgtgtgggaacaacgatatttttggtagagccatcccaaatcattgagttgggatattgtacttccgctcctaatgtcaccccttgccaataaacaggagcgcctgttccgcctaggacatccttggacaactttgctcccatagctgcataatcagctttgttatatggtatatatctacctgtcaaggttccaacgttgtttccctgaatatcttttagatccacagccgcattaccggagtttataggctggacaaagccgacgccatccacattccctgccgatggtatgtttgccagtaatattatgacaggcgattctgtaagagttacggaatcgctgccaacgcttgattcagaaacttcattcttcaactgtccatacaaagttttagctccagaagttgcaaattcgtaaacaatattatctttccatgcttcccatgcagcagacgccaagcctgctgacgtttccgccaatctgtaatgcgttggagttccctgactgatttcaaatgaaacaggtacggtatagccggcaaaagaatctttcccttccgccagtgttatgcttgtcaggccaacgggctgcactacctgtatagaatcagacttgatcgaagattctgtcgtctcatttccgacctgcgcatatactgtcaaattaccatccactatttttgagtcatattgaactgtcgaaccgccccacacaatccagtctgtacaatcagacaaatccgcctgttggccgatcttgtatttggtgatggtattcaacgtctcaaatttaaccgatacaataccggaatctgtgctggcatccccattgttgacagtaatactgtccaaccgtgccgtaacagcatctatcaactcgatggcggctgatctggataccgtttcagtagtggcatttttcaattttgcatacagtattttgtttccataagatgcggatagttgcactatcggattttcagtgaattccacccatgatgctcccgcaaacgatgaattttccgaaaccatgtaatgagttggatatccgaggtagtcaaatgttacatttacatttctctgtatcgccgaagctgctccgttatctatcgtgatgcctttcagagtcaatgtcggctcaagcagagttataccggctgataatactccggtttccccatacgcattctttagcttcacataaacggttttagcattgaatccggaagacaacttgaatgtcggtttttccacatattcaatccatgaggctcctgtaaacgacatatcctctgaaaccatataatgggacggagcctgaccgctgtaggtaatgtttagtataacattccggtcttgagtgaattcctgcccggagttgatcacaaacgattcaagtacaggcggtgacacccatttattgattcttgccaaatacggctccttcaatcccggtttcaacatctgaacaaaataataagcgtcatcatacgcatactccgcattataatctgcctcaaatgattccacatacttgttcacccgttccaacaacaacgggttgaagtcaaggttaaccagcagcctgccgtcattcatagcgaatgatgttccatacacattgtcccccgatgtgacagacaccccttccagtgacggaacacctgatatgagtacggacaagtccctgaaaaagaaattggcgcccttcggcacatacatcctgtaatgtacccccgtttccgtcacagtcttaacagacagcgtgttttccctcatataccaatattcaaagaattcatctaaagtagggaaccatagattgtctaagccgatatctccatacaatcgatgcagattcttaatgaataccgattcccagtgcgatcctctgtgtgtggaacctatcaaccagtagatcgattccttgttttctgttgcattaaatccggatagaatatcaagtaaatcctgcgcatattgaggattatcattatcgtataccatatcatctccgtaagcgaataatctctgaattgttacattatttttgcttaaagtaaaatcgggactgaatggataaacttttttaatactggggtctcctccctgcgcagtaatgacctgaatgttgtcattaacccggctgaaagttatatatttgtggtcgccattcggttccaccattaattttggggtaatgcctatgtactccttgaaaagtgcgaccgagtcctcgacacatttatcaaattttgcctgtgtgtcggtagtagcagtatcatagcctatcaaatcgtgataggctaccatgaacccgaagtcaaaaaaaagtttaaactccttttctgacatccacggtagaaaataaccgaaatcctggcctatgtattggttttttaatttatccggccaagtagcaacagtagttgcatatcttttctttattccagcaccatctgtacattgtgcgggcttttccggataataagcgtcagaaacatactgctctatctgcgggtcaccctgcatacccaaatgccatgtaagaatcctatcatcaggcaatttaaatcttttagctatatatcttttattaatcagcgaaaatatatactggtatatagcatagctatcgtccgtgatatagctaaataccatcttcttattatacttcaaaggtggaatctccaacgaaatagcctccctattaaccgagcttggaagcgtaatatcaaactcaaccacatcaccccggaatttgcaatattgaatgtgcatcagaccgtttacctcttcagataccgtattcctgcatttcagcacaacacacgtctgcaattgagaattaatgtaaaaccgtgtaatgtcataattgaaattgaaaaactccttattcaatccttttccggttgaagcaacgaatgattctacgttaacatacgtcccaaaccctagaggctcatccgcaatcacataatctttcgtttctccggcagcctttggcaagttggataaagatactgatctttcatagatatctattacttctccattcatcttatattgaccggccaattgttcggtaccggaaataacaagaggtttgacgaccttgtcgtttaaatccgaacttaactggttatataaagagctctgaatcttcgatatttcatccgggaaccgtttatccatattagctaccgcagcatctgcccgcgctgcgccatccaacgccggttgtttcaacgattgaagccattcttcttcgctgccgggaaagccattgtcgactgcctgctgatacgcgctttttccttgagacgaaagttcgtaccaatataccccgtcatctgccgggactacaccggttgaatcttgtaaagccaaatatttggcatttttataacgccaaatatcattatattcaacttctgtcttattgttccagtctcctctgggagtgatggatatcttgcctaaatctatatcattagccattttgctgcaatattaggtgtccattagttactttgaattgattctcataattattcgttggtacacttaaaatcaagtgtcctgtgcgtacattgatgcccattgttggataaacaatcacgccgtctttacccttcattttgtccattccgatcgtttcccatagaattccgcctttctgcttaacaagtactacgtcttgggcgtcaatatcatctgctctatctgatacattgtccaatccgcctaaagtgccggttattccctcgtttacaggtaattcgagtaatgcagtagataatgaaccctcatctccaagttctgtgatagagtctttatccaactctgataacgaatcggatatttgagattgtaattctgatagtgttttatcagagcggacaaccaaacctccgttagctcttaatagaaaatcggtgctatcaggttggtccttcctgatatattttccatcatcgatcccttttactctttcattcaaaaaggataatgctgatgcgacatgacgattagaaacactattcttaagaatagctttatcaatgtagtctattatttggtccaagacctcctgttgtgttgacatatcagttgaattgttgggtgaactgttcggtgtgtattcgtgccgatccaaagtcatcctcggtaattgaactggtataacgttgttctgaatcagcaaaacgaagagatagttttatactttccggagacgttgcgcgtgatgctctcgtaaggttctcggcagtgacatttactctgatgttacgtccgtttagccctaagatcttgatatcatcagatgacagcatgtcaatcaaatgtataagttcatcgtttgtgcggtatccggattcgacggtcatggattcacgtccggacaatctttcccatgattcaacataatcgtctataacttcatcatacgtactgaatgtgttttcttgctctgcttcacgctgaatactaccagtaccggtaatttcaatcaattcgtaagaaccatacgaattgaggaattgcaggagatatctttcttggctgattgttcctggagtaatgacaatcgtacaagatttaatctctccgacatagatttcaaatacagatgcaaatatgtgatgagtgtcgaatagtttttttcgaaggcggtataggtttagggcaaccggttgaccggttactccaattaaagttgtttctatgttgttggcaacgactttgattattcctccttcggggtaaatgaagggaatagggagcaactccgtttcgcgaattgtgataagctttcctgaggtcctggttgtttggaaaaaattgcccgcaggattcatcagcttccagatgaatacatttttgttttcatcattgagatgccgtaatattcgtttgctgacccctcctataaaaaccttcaaagagagtgtttgcgtattgccatcgttgttcgatatattaatagtaatattcttggagcagttttctgcctgaagcagaatatcctctgactcattatataactgtgccggttgtaccacattggcaagtatctcctggatgaagataaagaaatttccttccccactgccggtaaagatttcctgatttccgattgaaatgatatatgtggccagagaactactattaatagacaacttgataggattgccggttaatgccatatttgcgggagatatgtttgcggtcagactcatattacttgataattaggtgaaacgatttcttcttgcacgatgtatatgcacgaacagtactctcgcagaaattcttctctctctgctgtgggatgagagagaaaagaaaaaaggttgtcagaggtagcagatgcgttacctgtatattgctgataagcgctgattaacttttccacgtcattcgattgtatagtcgctgtaatggtctctgatgtattcatattgcaaaattgtatgttatacggtgaaatgtaaaggacattttatagtaactcggcacgtacagatagatcatattgcaggtcgtaatgcactcctccctttggctcgcttatatcatagataatctgaccgctaggagatgaacctacaaaaactttaattcggtaatataggtcgaagctgtaattgacttttctgatgaaatattctcttttgttatcataatcttcttcggtaggtactgaaagaggtaccttgacaatgagatctgctgcatcagtggaaacattttgatattgcagatcatacaaactattgccctctctattcgcttcctctctccaggcatccttctgggcttttacggctgcttcgacaactgaattcttgttatcaaatgttgcccactggtacttctgttcagtgacggggactgtttgttcttcctccaggttaaatggcttgagtagtttggtcgttcggagtttaacgtttgccgggaaggatgaagtcttaggtaatgaataacggatagtatcaggcagcattcgttggccatctaatagaataggagacgagaaatccggattcatgcattgttgggctgataaatgcatatcggctgtgattatatgattggcatggcgaagtattgcatcgtattctttccaaaaatggttgaacaagccatttttccctacaaaaagaagtgatatgtcacaagattgtccgttaggtttattcagaacaggctttccggaggcgtccaggcaaatttgtgagccatacgggagtgaatactctttattaaagaaggagaaacaaaatgcaagcggggtttgataatctacgttttcagacaattcgatatccgagcttgaaatcgtagtgtatcggtgtacttttccgaaaagatataggggtacatataagtaggaatataagtttcctttgaaacgttctagatagacaggtagaaattcatcaatagaactaatttctttatatgccatgtctgcgccacggtcccatggaaagaaatccgtggataccaattctgaacgtccggatacattatctgtcttatagtaaaatccgtatgccttatcgtatcttaagtatccttgtgcctgggtggatacaatatagtgatatggttttaggaatttgtccagggactcggatgccggtgcagccgtccactccgggatctgtccgcgaacattggtggaagccgataactttaattgttggggcgcttcgaaatcggttgttggtgtggaagccttcaataaggtccaatctgaagaaggatttgacttgagtatatcccgtataaatttcaatcgaactgtccgggtgttaccgtctacaaaataaagcaacccaaagcgacaccacagtgcttgcataaattcattaatagtgcaatccggcatgaggttggcacattttaatacaccttttacacaacaatctgccgcgttgttgagtacgactagctgttgcagttgatgatgactggcgaatgggttttcaacaaccgtatatccgtatgttgaaaatatggcttcaaggatattcctaactttcataaatggtacgataccgtatccttcaggcagagatacttctaccggttcaccattgatgataagggtttcggtccgagctttccacagatagccgttctgaatattattaattatttcaatataatcggtatctgtattattttctgtttttcggttgcaggttaaagcgacaggaaacaggcaaaatggagaatcatcattaagtctgttttcaaaaatgtaggatataagttcaggtactcctccttcgggctgataaacgggtaatttgatggactgcaaagacacagcattccagatactatacaattcggattcgccaaatcctacattaaatgtaatgccttcttctgatgtattgacgatattcattttcccgatacgatgatacaccccgtctgcgaccgtgacacgttcatctgcaacaggtgcagagtcgatatccgttcgttgaatgtgtccgttcaaacgaaagttgttttttgtgcccggtattgttgctgcaatactttgtgaaccacgctcattataaatgggcgaactgtcttctatttccgtgctgaagtctttcgatagatcgaaggtaccggatgcgtttgaaattcttaatgccatattagttgctatttagttgaacgtgtgaacggtttctttgacttttcgtctagctcttgggcctttcgtatgtcacgtagtgagacgtatactttaagatttttgagtgtgttgattaacattccaatttctttgatcagtctttcagattcagaagaagaatagcctgtgtttgtcttttcttggctatcgggaatgttcttatctattatagagtagttacctgaagctctttgggaaatgtgtccggtacgggcatcttcaattgctgataaaactagtggatagtttacgtgtttttgcagacgtaccaggtcttcagcattaatgattaactctgcaccattttcggatattaaagaggtacgccgtacaattccggtaggagcgtttccaatataaggaatatcccggtaacttttaccgtcatcttccccgataatatcataccggccggatgcccattgggagacactgacagttgcacgcttgggggcatcagtaggggtggagcctgaatcgctggaagaatctgatgaatgttttccgccaactaatccttttaaggctgttttggcggttgcgagtgctgccataatcaatccggagaggatagcagcacgagctgcgccggaagcaccgaatgtggctaccgagtcaggcatggccatggcttccgctgtggatctggcaacagcaccggttgctgtagctgttgcttttacaatttctgcttcaactatttttcctaatatatcgaacacgatatcaatcatagtatcagcaaagccttgcatcgcgttttcctgtccggaaataagattgcccattgcagaacctagctcggaaccatattgcttgtatgtttgaagtcggtcttggtattgttgctgctcttttcgggtctgggcttcagtctttttttgttcagcatctttggctttggcgtgggcgtcttgttcttccttcatgcattttaccttgaaatcaagtagttgtttctctacttgctttcgttgttcggcattcagaccggtaagggagagcattcgttcgagatgcatgatagtgagttgttccatcgcatcattgtatgcagcctcggaattcaggttatcatcttttccggaagcatacaacatttttaaatcctgttgctgttgttcatattgagctttttcttcgttgagttgttcttgaatgtgctctttctgcattttaagcttcagatcattaatttgattttgaaaatcaatgccttctttagatttgctgccagctgctttcagagaacgttccaggtattccatttggatgcattccatttccttttgaagttgttcttctgtttgcagagtttcatcgccaccttccaggtacatctcttttaagaaggcttgtttttgggtatataattttttttctatttcaagttgctctttgagtttctcttggctttttttttcatcatcagtagtagtattttttgaggtgggtttattagctgtaaccaccacttccgctaattgattactttgtgactgttggttacttttttctgaaggtagatagggagaaaattcatcttgtatcttttttatgtctttatattctttctttattgttttggcataatcttctatatcgcctattaaatttgtggaaaggtgtccgttatcgtaatatactctacgtatagtattgtataaagatttagcaatagattcggctgtctctccttgctcaatgagtttttttgtggttatatctataccttggctaatcttgttaacctgagaagcgggaagatctgccaacaagatgtcctttacatccttcatctggtctatttttttatccatattatctctggatattttttcggatctttcgttcagtattttttttgcaatgttttgttccattgccgtattaatttcattataggctttcttgatgtcttttagagatgaattctcatctaacaggtttgtcagatattgaccatatttagaatttatttcttctatcaactccttgcgtcgttgagtgccgtcaccggctttcccggcagcatccgtcaacttgcgtaattcgtctcgttctttattagatgctttaagaaaagagttgagagcatcttccgcttctgatgttcgtgtaaagaatttgtagaaagccatagctgctgcgattacagcagaagccactagtgcgattagattacctttggttgcagtattgaaggctctcattgcagttgtggccattttaatgtttccggataatgcaaatttagcggcagacagagctagtgtagaagctaaacgaattttactccaggtttctgctattttgtccgtagcaatgttgagtagtttggcatttctaagttttgtctcataaaattcggttgcttttactgcaagataataagttgtaatggcagtagtcagggtaataatggtacttgagtgtttgaccatgaatccgatcaggtcaataatctttcggctccagtttacagtgccgtttaccacgcttatgattgaaggattgagcttttccattagctccattcccatttcattcattttgtttttggcttgagcgagtttggcagccgctgtatcggatttggtggctgcttgttccattgcgacactggtaccggtgacagccttagtatagtatttcactttttcagtttcgttgatcaggacagaggcaacgttatatccttcttcaccaaacatttttttgatttgggctgctgatagttgctttttctgcaagttatccagtgcggtttccaaacctactattttgggattggtctcgtcagctccggtctgtaaggtcaggaagaatttctttaagccggtaccggcaatttcatctttgatacccttttctgctaaagtttcgatagtgcctactaactgctcgatagggatgttggcggatgaagcggcgacacctgacttggtgactgcggtagttaccgattcaacggcggcagcaccgtatttagaaccggcggccatgacattagcgtagcgggctgcctgatcagcaccgtccccatattgattgagtgagagagtaacggcgtcaacagcatcttttaatgacattccggaggcggaagccagaataagagtttgttcggttacttccgctaatgcttccttgttcgataataactccggtttggcagaaccgacgagcttgtaagcgtcaaggatttctgttgctgattgcctgatgcggattccggaatctgtcatttgagtagagaggcggactgcttgttgctccagccagtcgatgctgtctttcgacaagccggttaatgcttctacatcggctttagcgtcttcgcgttcgttgcgtttctcccgaagttgattcagtttcagagttaatccggttacggccgctatgacggtggtgacaacagccgcgtatttattgaacatttccactgctttccctattgggctggcttgacatccaacttctacgcgcatatttttttgtgctctggatacggcttcggtcacccgtctgttttgttccagagctgcattgtattgtgcggtatcgggtacggccgcacgaagttctttacggacgttttgactgacagcaagtaattcgtcataggttgctccggagagattcttcaagacacggtcagtctccgagactttttgcttgtaagtgtttagggtcttgtgcttgttttccagttctttttgcaggatcttggatttcttgctatatccggattctgatttatcgagagaagatattttgttttctaattgcgtgatagcatcttctatcttcttaactccggcagaagcttcggtgccgtcgatgaatatttttatactacggttcaggtcgttcataaggtctgtttttatttttctatgtatattttgctcgcgtcgataatcatggtatcgaaatagcgcatacagatatcagcaagttccggaagccggttctttataacaggatcgaaccaatgatatgcgagccggttcccttcattctgcttaccaagtgaggcgggatttgtatggcggatgatgcttgtatttatttcaattccattgattcgttttagataactccatttgctaccggagaaaccgccttgcccatgcccggctcccttgtggatgtagacaccatgtctgggaaaagagaaacctagacgattgataagcccgtagctgtctgtatatgctttgggctgcaactcgcgagctatccgtagactacgtgatgcaatagaggctttgagttgtttggaaacggaatcttgccattgctctatttctttattaaacgcagttgaccgatctgcatctttagccaggttgaaccgttctatttctgaaatcgtctccatttgaatgaggcgtgaagaaggcgatgaggagaacttctcggcttttcgtctggctgcattgtaccgtctgacttcattcctgttttctgataatcgtttataaagtcccattatagaaagaagttttcgtcaatgatatagtcttccggaacattcagaaagaaagtcaatacggtgccatagaaattgtcaccgataggtccaatgccattaatctgtgtatttcggtctacatattcgacttccttcagcagtttgttgcgaatctgcttgcatatacatttacattgttttgcagcctgattgatagagttcggatttccggagaccgtactttgggcgacgatgaatgagtagacttgtttgtcgttgagtgcgtccgctccattgtcttcggagtcggattcgcaaccatcaacagcaattagaatgtttccgtcaacagaagacaggctgtcgttaagatccgtcaggtcctccagtccgaaagctgtgaagaatcttttcttctgtgggctgtgtgagatgtctttgagtgacgaagccagtgcttcgccataagcgaaatggtcatactccataactgcatgatatttaggttatggagacaaaaatagcccgcagcgggcgggctataaaggacaaaaccggagactaaaagagtaggagtagtcctagcaaaagaaacattaatataatccagaatgcttttgctagaaaagagtgcgaggctttaaaaaaggccaggcacagtagtactattccggatatgcttactatcgttaatatcatttttgttcttcgtctgattcgggaagcaagatacgaattaattcagaaagttgtgcggctgcacgttgtttttcgtctattgctgcttccggatctagtaacttgtttattaattgtaaagcttcatgtctattcataatgttatttttttagaggttgaatattacttattgcttggatatgctttttaattattctgatttcagatatgagtgttagtcgattgacagaatcgatgtccggagaatcaatatcaagagccaggtcaatagctttttccaaaatgttttccatccatgagtgttctccctcttggatagtctttattgattcaatacagtcgtcggtgaggatgatcccattgatttcggctggtatcatggctgatctcctttctgctccaataggaaagagccttctccgaatgagtaatgaccgcgcactctactgtatgagatatgacatacaggattgctgtcatcatcacctaactttatactccattgtccgccggaagagtctccattatgcccattaaacttgagaactttttgatgggggtatttgtcattcagttccttgacaacttcttcaaattcgcattttagagaatccatagcacattcatcttgtactaaaattcggtcgtatgcctgggcgaactcacacatttcctgccccttgcggtttacattcttgtaagtctgtacatggtggatgaagaacatcattttctacctcctttctgacacttctttgctcgatagacacaaagggcagcaccgatcactgctgggggaaagatgaaggtcaaacaaaaacaggcgatagcagagacgtaataggcgtctgatgcggagttgatagcgcagtcttttttcagttcacggaagtaacgctcttggagcgtgtttacatctgttcctgtgcggaatgagggcacgtagttcgtgccctgggttaattgttgcatatactatgagttgtttggcattatagacaagttctcttgcatcctttaggatgcaagaacggctgtctaaatcccgtgtcgccaaacaactcatagtataaaccccgaggagtatatatatgacaggaaaagacagccgtattggtttaataaataaacttctactatttcgtatataaatttgctgaagacatgaatatcaaaagcaaactgatggacataaaaaaagcccaatttcgtatattgagcatctccgctagatactcatcggtttagtagtttaaaactacgagttatttggcgatacaaatatgaggataatatttgagagtgccaaaagaacttagctttatttgatgctaaatatcaattccgatagttgctcctattcctgttctgattgagtactgggcagaaatgtaaaatcgacaaatcggatatggatttttagttgggaagcggtatttggcaaacactttaaattctccggtagttccattggatgtggttttatagtagttcccattatctcctaatatatgaaattcatcaaagcaattccggtatttagttcctactgcaattccgacaccagcacctaatgtaaagtttttaaagtcatatcccatatcaaaagtgacaggggtgtaataagtaccttcttctttaacgtcttctgacatttcatcccaattgactccagcattataatcttctccttttgttcctttttgggcggggatagctatgctgagaccataatatatttttttatgggtatagtggatgctgacggggatatatccttcacttgtgtatccaaaccctacaccgaaaaatgaagttcgctggggaatatcactttcttttttagttggtgtacttgcgttaggctttgactcactaacaatagttttgtttgctcctgatgtccacttttgtagatccgaattttgagcagaagtactgcatactaaggcaattatgcccacgaatagtaagatgatttttttcatttgtgtggttttaatttgttacggaacaaagatagtggtaatatatttgtaatgccaatagaataatgtattttagctcaaaaataaatgactatggagcaaaagtgtattatatcagaacagtcgcgaaatgaacttgataaaaatacggttgatttctatttaaacgaagcggaaagacagttagagggtatagtagatgtatctaataggataactgatagatcatatattctattaacaggtattattactgtgttgactggattcgggtggatattaaatatgcaagaaggaaatataagtcttgtgttaatatctatcattggtatattggcttctgttgtggttttgggtattttgatattgaaaattatatgtattcatactatttggttgtctggtaaaaagccttcagaactcgatattgatattttcatgaactattatcgttcttgcaaaataaaaggcaataagcgatatgtgaatattgtagctgatcatttagaggctattgaaaacaaaatagcccttaacctggaagatattaggataaggactatttggtatggccgttgtttgaagatatgcttttttacgatctgtataatagtctgtatactgattgcggagcattctacttctgtttgggctttggtgcaccattggtttgaactccactgcccggtctgatttgaggtttgatcggtctactaggtgttcctttactcatgattaaatatggcgaatccctcactatagtgtgcccaccggtgttattaaccggaaccagatatctggttacactatggcaagggattcatgttttaataacgatattgggcaggtgctaaagtacaatctttttcagattcggcaaaaagtaagcggagttttttgctccgcttacaaatgaaagttagaagttggctacttcgtaatatttaaaaaagtaatatagcgctaccttgtgccatttggtcagctctttgtcaccggacagaagtgaggatacggtgcatttgtcaatacctgtatagttgctcaggtgcttactttttaatcccaggcgttccattcgtctttttatccaatcaacggtaataccgtcgatgtctttacggtcgaagtttacggcagatacggtcagcttccagttgtccgggatttctcctttaaacatttcacggatacgttcagtcagttcttttttactaaggaacttgtcatttaccagatctttttgttctgctcgaacaattaaccggccttcattataggagacaacttcaatggagatgtgccccatgcgctgatactgccttgcaaattcatctattcgctttttactctcggcagggagaggtagtaattcaagattcttcataattcatcaatttacgttttgataatcgggtatttaataatacaatatactttgtaatggaggggctttcgcccctccggatcacaatttgatgagtctcatttgcccaatgtcgaaaatagcgatctgcccattttcacgtccgaattgcttggcttcttcgagattagtgaaaatcctgatggagtcgaaataaaactgattgttttcttcgttaagccatccaccgactttcttttcgtgcatcaaagcatgattaagaactcttttcaatccttcttctccgaaacagtcttgggtttcaagataggcgactgaaataccttttgtgaccttttttaaggttgtgaggtcaaccgtgaatccgtcaggattcgcatctgctatctttaggatagcctcgaacaattgttccataatataaaagaacttatgcggacgtcacccgcgtttgtttgacactgcaaatatatagaaaagtttgctactaacaaactttttgttgtttatttgtttgctactaacaaacttttatctgtttcttagactttcttcggtttcctctttacgtctgatcgattcgtccattgcgtacaaggcatcaagaaaaagaccttttctgatttccggctttttggtcatgtctgattgtgcaagggagtcaagtagtcggagctgcgaatcaaatacacgaccgttactttttccttctccggagaatattcgtggataagcttcggccatgcaggagagacttcctagaatgtaccagtacatagttatttttttatcttcagggagatgttgcagaatggctgcatctttatccagacaattgatatcgaactcttttccacgatgccacagacaagctaacaggtgattgatctttttaggatctgattgcatggcgtccaggtatgtttgcagatacatgaattgtgcaaaggtgatatcgaataattggtcttccgggccggtgaattttcttaagcggcaacggagggttggataaggattggttgtcagttcagggttaataaggtattgtttcaatgaggtattgaggcggttctctactttacgaatcagaaagttgaactgatcagcaagcaggctgatttcttccggaaggagaaagtattgacggctgcgaatctggaaacggacagtttcactttcctgcccgatttttatacggacatattccttgaatatttttttgtgccggcatacgtgcgcttttagacaataaagcatcatgtagactttaacttgctctaccggtacatttgattgggtaagtgctactagataaagaagctgcttgggggttagttcgtcccagtttcccggtatcttgtaaatatcgtcattgatttgtattgtatgcatgatattatgatattgaggtaaatagctttttgtctttggaattgaagttcatagcttgagatattgtttcaattccaagttccgtcccgttttctgtcaggtaggagcgtatcttgccggcgtagtatgttgcctgatcggcgaagaagttaccgtttgcggacggatcttgataaatcggtcggatagtgggggagtattcgatctttctaccggatatacgttgctcggttgttttctgtgaggtgtacaactcggctgttttattggcaagataacggataatatattcaataagtatcttctgtttgggtgtttccttacttttagagaatgcttctttcattgcttcatatactttgtccgatatcatttcccggacgttatgttcctgaagctggcgaatggtagggaacatgatgcgataagataatatggagtagtctatatttaccatgccgatatcttgaaaatccgtcgcattacggataaaacaaaagcgggaaatagtgtcagcgacatagtcagaataatccgccttgttttcttccaggtaggatatcaaccggtcgagagcttgcattccccggaagcataggtttactttggctgctgcaatttttgtgtcactggcaggagaacgttgcccttgtacattacttactgtgatgccgctgtctccaaacatgacacctaattcgtcagtagcaagcattagggtcaatgggccgagtgcacgtagtaatctgtcgcataattcagattctgggcattcttttgcttttttgatgacggactttccgatgtatggctttatgtagatatccaatgcgtcttcgatatatggttcgatagactcataaggcagcgaggcgtttattttgactacctttttaaaagtttcgatgtcggggatgagtatattcatttttgttcagtttccggggttaaacctgtgttcttagttgctcccgtacctttgtcaagtgtggtcaactggcagttagttacggcaaaatagatgtctttaggccactggtttatagccttgacaaagtatagaggttccagagttagatcttgatacattttcattagtgcctgttcaatagtgaatagctcgcgggcttcggtaccattgatactttttccctttcccggagctgcgccgataatgctggggtgtacccccattccgtaacacatcatgttactgacttcttcactgtcttcgatgtattctccacctttgaagaatgattcgagaggggtgataatgatatctttatcttcaaatccttttatacggtcatagcgaaagtgggatataaaacctttgccggcattttcttcgccggctaagaagtcgttcatgtcttgaaggaatttacctctgcggattgccttttcatcatctttgacaatcttttctgatgcgtatagcttctcccaaaaggtttcttggatatagataatgtatctgagtgccatttgattcttgatcagtgattttttgaaaacagggattgcactggagaaatcataccagccggacgcaaaaacgctccaccaatacggatggctgtaataaaaacgtcctggagtggagatacgaagattgtggatgaacctacgatctttgcctactattgtttttccgttgttgttaggcgcaagcccgattcttatttttaaatcgagcaatggagattgcctgtcgagcaggggagtggcgacaagatcttccggtgttcctttatgccattcggctgagtaaccgtgccactcgcttttcccggtcttctcgtcaatctcacttattcgggaacaggtagactcttttgctttgatttgcacgatacggggagatttatcatcattgttaaatatatactccagatagccgtcatagaatataacaaggtcattggctaactccatacgtataaaattgaagttgttgttttcgaggaattcaaagatttccggctgttcctccgggaggacttcttcttttattattttctttgtagccttatcgcgatacttgcgatatacgagtatgctgtctccgaatacgactttgttcttgaattcaatgttgcttcctacggtaacattaatccctatttttttcataatgtcgtaaggcatattattatttcgtccacgttgcataaatttaattggagccgcttttcctttgggagtaacttcaatagcggatgtgtttttgtcagtggtgatatcggtgttatcactgaatttgataacattattgccaccttttaagacggcataggtatcatatccttccagaataaggttagctggtgcctgttgcagtttttgctgtttcattagaaatatactttgaaattattgaatttggtgacaaggcaccggcgaatctttttgggggtaacttctccacagggtaatacattgattgtgcttccgctgctatggaatgaagttaatactgctcgatcgtaagtaaccaattcgccattgctttttttgcagaattggatagagaattcaagaggctttccgtcttttctgcgttccattatctgccagatcttactttgatgtattcttttgtcttttagcatgattgataaagattaagatgataaatactattggaatcccgatgattagtccgtatttgatgccgttgtctattccggttgcgacggaattatcggcgtctcggtgagactctaatttgctgtcttgctgaaacgtgatatcagttttcgtcttttgcttctcagatatgtgtacagtgtcattttcttgtagcagggttttgatattcttctcgctcccctcaatctcgatatccgatatcgggggtaggccggtagccggatttgtagctttcgatgtgtcgaagttgactttgatcttccaacctttatcggcttcttccttattgaagttgaatcgggagtagatatctccggttctatcgtacagagttgaatctgagatagaaagattactttgctcttgagcgctacgatctttttgataagtagtacggcaactacacaatagccaagtgatagtaaggctagcaagaagaatgagggtgtgtacatgatgtttcattgttttcggttgttacacaataggtttatacatttgaatcgtttcaggtcggctatttcgttttcgttatccgctatctttttatcctgatctatttgattgttttctagcttttctatacgggtagcccactttgtttcgctttctattctctctttcttcatagcttctttgtcggctctcaagtcagcgattagttcctgatatacatcttgtacggagctgagagctttggcttccgcttgtttttttgtgtacttgagtgtaatcaccccagtgatgaatgacaggagaccaccaccgagtatgaatgtgagtagattctgtgtaatgatatcgttcatgaccttctttttatgcaaaggtatcagctacctggtaggtcataaaggacacgcctacggcagaaaaacaagtatcacgagcgtgatgatttttgaggggacaggtgctgcatataagggaaattgaaaaactttaggtcgaaatttcttttcagggcggtgcgtggtcttttgaccgataaaggggaaatttttccccttgagaaccctttattggttggacgacagcttcttgcattttttgttatgggaattacatgagattaaaaaaaatgccggaaaacggttcggaaagctttatttgttttttgtcgcaaactaaaacaatttaatcattccgaaccgttttccgggaatacgcccttttctcatcctttttggtggggcagagtggtatttctgttttgttgtctctttctcctttttctgcctgtcgccacttcataggtatgtctctttcgaggtatgttttccgactttattccgcgaaggtaaatgtttcttttcctatgcaaagctcaagccgtctagtttatcttaaaatctccacgcctgcgggttgtatttaaagataaaagcttggcgtcgttgcaagaaacaccttctagggcggcataaaggcgaaacataccccgagcgaaagcgacggaataaaaaaaagctccaggtagggagaaagaggataaaggcttacaccctccggacttcaagttcaagaataaattaacaataaacacagtataattatgaaaacaagaaacgtaccggaaagttggaaaagacagtggtcaaagtttatgtattgcttttttgattatttgcccgtcaagtatgaagcgaatgaaagagaatggaaagtacggaaaatgatttgggattttaaagatgggaaacgtagtttagcggtggcagaattgattgcaaagaagatacgggaacagttcggggcggaatgtgagaatataacgtttacctgtattcctgccagttcttcagataagaatgaatcacgttacaagaactttgcggaagaagtggcaaggctgacaggctgtaagaatgcttaccaagcgataacagtagaaggaaaacggttggctattcatgaatacaaaggagccaaggcggtacaggaagtagaagttatcaattttgatgaatctttttttaaggacaagaaggtacttgtattcgatgatatcttgacacaaggaacgagctatgcacgtttttcatgcacacttgaaaatatgggcgcagaggttttgggaggatattttttaggtagaactttaatgatataagaatatgaataatttatttgatatagtaggagagagcagacatctaagtgataatgagctaatatataatataacgaatagcgagcaagctgtttcccagttcgtggaagcattaagtcacaatgaagatttgtccgtagaaatgttgtttgagggattaacgccaggaagaaaaagagtggcgttggcagcagtggaactgtataagagaatgcaggaacgtaaatttgaaaaacaggtagtgaaatccagtgaagacgtttataagataatgtgccctctgattggtgaactggagatagaagaattttgggtactgttactgaatcaagggtctaaagttatcaagaagataaggttgtcaagtggcggcattgatggaacatatgtagatgtaagattattattgaaacaggctgtattgaataatgcgacgagaataatagttgtgcataatcacccgagcggaaataaacagccgagtatgatagataataggttgacggataaaataaaaaaagcatctgaagtaatggagatacatttggatgaccatttggttatctgtaatcatagctattatagctattctgatgaaggtcgtttataaagggaagggtgcaggggcacccattccgttttgctcgcacgctcgcaaaacggaatgggacccaaaataggtattatttatttgattttcgttccttgaatcacgaagaggcgtgaatgctattggtatattatttatttattattcagaaagaagattcctccggcacgtgtacccggcagagtgaaatagaaattcattcctagccatagtgtgtcaaatgcatctgtgatgtgcgttttatattcgtccggattatcaggtgtgtcgggtgttccttcaggtgttttatccttttcaaatccgttctttccctgtttgaccccagtttgttccattgctattttcaggaattcgttttgatgaaggtttatttgtatccaaagaaattgcggatctccttttaaggttaagtcaatgtttaagtgcttccattcgtgtttcggagcttgtccgacatataccattgtgacatgatatccgttttctttgaatacacgttcgatgatgtctgcataggtttcagtagaagatccggattcccatgtaaaagtatggtcatagtagatgactacatctcgattaagcttcggacggtaatagtcggctatcattttgactaggtcttgcaattttccgggagttttgacgtaaaatgacttgagtacgcgcatcgtgtgatcatccagctgtccgacgactgcggtggatatggatgcattggagtcaaaggccagatgaagctcctttgaaaagttgaggtcgccgtcgcccagacaaccacatgtcgttagtttgctccagttactgcctaaatcccggagacgtccgttatcgccaggcgtgtagaagtgaatatcatcatccaaggccgaataaaagcaattttcgatccggaataaacgttcgttcataaaagcagtacgccagatcaaaggaggcgagttccggtacatctgccaaatgaagtcttcaccgagtacttccagattgtcgaacacatcatattcaccgtagaagacggtatattcctttgtttttcccgggagaggtttaataggaggttgatatctccgtgcaaggtctaaatcgcgttgatattctttgatcatgcgcattacatggtcagtgagtggctttcgtttgtattcttgtagcttgagatacaatgttctgattagattgatatgtgcaggcgacatctcgtctatcttatcgagaatccattttcccatagaagcagtcggcatatctgttgagtaacttacgctgtggtgatgaggacagttgccgaaatattgccgattaccacgattggcgggatctacttcacttttaattttctcataattgagaaacttagcttcgggacctatcacccagtcgagtgacatagagtttgcggacattccttgattgaaggagagaattaccatgacggtaccattccaaaaatgaaatgcattgctccagccatcgcctaataccgggcgtaccggtttggcgaatcccatgctttctggagctttgtggccaacgacataatgtattccttgtatatatccccactcagcaagtgctttgcagattgccggtaatgtgtttccccatgccttggcgtaactcggagagattaggccgcctaaagaacccggcatttcccatacgttgcggagaatgatgcgtgcgtcaatcccttcggattttccggtaccacgtgaggcaactatatattcatcatgtgcattgatagacatggcatggcgttgcatcttattgaagaacttgtctacaacctcatctcgttttctgcggagttcatatgcggagagggcaggagagttctgcggattcattctttctcctcctctgtaataggtttgatgtctactgctcttttacttagcattcctttaaacagggtgcgcagctcttcccgtttttcttcaaggttttcaatctcttcaagtccttccaggagggtgacgtcgtccgaaggttcgaatgacggaggaatcatttgtgaataatcgaatttattatcatctttatctgcacgtgtatatttgcctattttatccaatgcggcagcagctccttttgcatcttctttgcccattgccatattaaaagccctcttaccaccttctacaatcatataccggtaccaggatgttgcagctagttggatatttccgactaaccggttgatcataccgatatcccggtaggcttgtgatttggaaatcggttctgcatttcctccacaaccgtgtattaggaagtttaccaactcagtgtccggaataagtggttcttccatttttttactgacacataacatcatacgttttttgatttccatttccctgggggaaaggatggttgtcgattcgtccttatctttgtataaagctcgttcgattctctcgtatgtaggatctttctttggcattattcattgatgctttgttctttcatgtatttatcagcaagaggttcggcggcaggactgccagcaacggccagtttgataactgttttccggagattgagcttggtctgaagtctcccctgatgataggaggtatatataggtgaactgcaatgatttttacatatatcacagaagtagtcacgttgatcagtcgggatatctagcagtattgcgatttctgccggaggtaaaagtgctgcagacatatcttttatttgctttaatatttcttcggacagagtcattattctaaactttcatagtggatagcgtcttcatacgcttgattaaacatatttgagaaatactcgaaatgctttccggaagtgaaataaaagccgttttcccatcggtggttttgattaaggttagcagatcctgcaattccaaatttatattgttcgttttcgactagcaatagtttggcatggcaggaatcaatccggattctcggactaatatttgaagcaaacagtaatagatcaagcttatgacgttttacggtcgtatccagcaaaagagtaaggctttcgattttcttttcgtctgaaaggaagaaaagtggacgcagactgtcttccgagatactgaatgttgctatttttacgtgtgccgggcctatatccgataaaagagagggcaacacttcatgtattgcccattctcctttgtgcatgaatggctcgatagaaccggggcacaatgcaagtggaaagttatcctgcactcttttcaccttgtgttgctgttatctctgcttccagtatggcaagttccgtctcatacttctcaatgcggtccaatgcattctgcatgacagtctgtttgttgtcctgcctggctcgttctgaagcggctttgctgttggctatattatttttcaaacgcttgatttggcgggcaatttcaaaaccgcgtacaatactgttttcacttagtattggccgcttttcttcaagttgcagttcacctttcccttccgcccaggtatcgatctgtttccagagtttgcgacgttcatcatcgagcttgcacagttcttcggctatcggttgtcgttcttctggtggtatgtcttggttggccacatcattatgcaaacttgcatataaaggtgctatttctttgatacgtgcgtaagctttccggatagaaggactgagtgattcttccgtgataatcttgacacccggagtgttcagtgtttcgcattcgtttcgtaaggcggatagttcagacattttttcgtcaaattgctcctgaagggatgccagttcttcggtatggctttcgctgtcattttccagatcatcaatacgggactgcaattcattgactaatatttcaagcgaagtgatatttgcttgtttttcttcgattacttttttccgttcactctcgtttatggtcctaaccacggcaatttcctcaagagcggcaggatatagtgaaggagaatatttgatttccttgtcaattttcgacaggcaattgacaagctgggtgaaatgcgggtcaaaaatatgtggactttccggagctgtatctaggtaagctgcgtatttctttttcatagactctttagcaagaatcccgaaaagaaccagaccgtcagcatatttgcgctggcggtctcctaaccattggctgagttgttcttgtctgatcatattattcgattggaggcgttggggccggttttaattcgcctatgacttccatatcgatgggagtttccaggaagatcgcagagtaattggaatcggcggtagccgtataggtggtaccgcgacggtcgcttcttgcttttcctccattgaatgaaggagcggtagaagcatataatcccggttgccccatgatcatttgtctgccgtcagagtcttcaaaaacgtaatagcctgctgtgttttttaccaatgcattgaatgcatgcatttcaggagtattgccggggaagaagaagctcagtgtttgtttatagctgatcccgtcagcttcaccttgctgctccgctttatagtcgactgttgcatctgtactatatagataaataggttgcttatacgtcccttctgcaggaaaagcaaatgtaccggctgccgtcactagtgcttcattgtctgctgctttgccgggatccggaacggtgggtactgtattgggtgcatcaaatgggacgaacagtaaccgtcctttatatccacccatattattttgaccgacattccatttcagcggtgcgaaggccggaccagctgccaacatggtcaatgtatttccatcaagatgacatgtctgagggtgtagttccgggattgcaataaccaaagccacaaagaacatacagagtattaggtaagtatattttttcattagtgtaattgtttagagtgaataggatagagcgaccaaaatggccgctcatttttttatctcagtttaggtataagcaccggttgcggttgtaactgcgccttccacgacagtcacttcctgatcggcaggtttagtcttaccgtctacagcagtaaattcaatagtgtacttgccgggtgtgagaccgatgatgcattgaccattaccacgttcggcaactttacctttgatggtccaagcagcattctccgttcctgtgatgtcgacttgtacacctccggtcttgcaataatcccctgcaaggtctagagattcgttcttttgctcgttacagcggtatactttttcgtgccagtcgcggatacgggtatcataacccgtttgtaaccagaattgccattcattcggatcttcgtagatgtcacgaatttgacagaatttggttgcggcctgagtgttgaaagcgacatccatgttgccttttttctgaagaaccaaacgcgatccttggcctagtgcttcatgggagagaatttcgagagcagggcacattgcgtcttcacgcaaaagttcaatcatacgctgcattgaaggatactcctgcatacgcagtttgttgcggagagcagagcgtgcagctattaataccgtttcagcacaaagcagctgtggaattcctgacttggaggaacgcaggtaagtgttggcaccaccaatccattcaaccaaattttcataagcggcggagtctgtatcctttgtaggcaaagtaaaaagacctgatggggcaaagttgccgcgagcagcattgacatcacctgttgtaatcagcatgtcggctttggtaaacagaccgtcaaatgcgcctgaaggtgaggttgagtcttcgtcacgttctgcatgaaacaatgtatataccacgtcttcgatatgcgattttaccaacgtgaaggctacacgggtttcaagaggatgtttcttgttgatgttgctgaccggctgacctcctacgatcaacaattcaccgtcgtcgtatttttgggagttctctttagtgatacatacaacatctttcggttcgatgacggaaggttcataaccgagcagcttatcaaccagacggaagtcttttccaatcttgtaagactgggttccgccggcacgacggcgctcattgattagggcatgtttgccttgcagatccatcacgttcaatcccagtttggcggcaacttcctgtaaggtggcaaatgggagcgcgcgaagagccttatcgtaggtgattaaggcttcgttcaatttcgatacgtcaattaattttggagacatattctttaatagttaaagttggttagtaaattaaaggaggccgtcagttttcaggcgttctgtgatttccagataattgccggcatttttgtcgcagtaagcagccagatcttccttctctccgcttgcggcaggttcactcttgggagctggggatcgttcacccggcgccggtgttttcttcaaattagctacttgttctttgagctgggtgatatctgaatccttggcacttacctcggttctcagattagcgatctcttggtccttttcgcttaccgtcgttttgagtgcggctatctcagtagtcgcttcagataatttttgatcgatctcctgtttagcttgtacgagagaactgttctccgatttcagacgggcgaattcattatgcagggagtcgagattctctgctgatagttcggtcgttactgccttatcttggctgatattcagaaaagataaaaaagctgaccatgattcttttaaagtcattttgtctttgaatgaagttgataatactggcacggaattcgtgtccatacccgctgccaggagaacggatgtggaacgatcatagaggcgaacggcattggaatttgccggaatatccacaatagatgcttccattaactcgcattccgtgacagtttcacgggtttgaccgggtactagaagatctttgtttgctgaggtagcaataatgcggattccgacgcttgcagcgttgtaagtccctgcttcgtattttgcggcaattgcttttgatagatcatcaactttgtcgaaaataggaatggcagaaagttcgtcgccgttaagttgtatatcctcccaatgaccgatagcttttgaatctccccaaatgggagaaccctcatcacggaaatgcatatatagcatgaccgggtttttcttgaatgcttcgattagcattccggaagtaagtacccggaatccgtaacgattgagtgaggaatcggaaagaatgatacgtttttggctcattatactgattttggtgcaatgatacatttattgaaaatggtacggaaggacgaattataagttgtagtactgaagtatcggataaatagaggttcctgataactgtaattcatagccgctataatcagtcacttttttcccgatgattttattcagacttcccaatagtggatattgtgctgtaccataaatatattcatatccgttggtatctttacaacggagaatacatccttcgacaatcttatagcgtaaattatcagcttcttttaggctgatagctgctttgagaagccggatgtttgttgaatatttatatatcgtacctccggaggtttcattaggggtgacagtcggagcttcaataacacctagagtgtggaggggatgccaggtgtgtccctctgtaattttgatacacgcagtgttctgatgaacagcaaacaatgcaatttcatttttaaataggatatcggcacttaatatgcctcccatattattataattattcataaagtgttgattttcaattagtacgcatttttgagtcgtttttcgaacatttttcgatcaaaaaaaggacaattaactacacttgcccggctatttttttgagcgattataacctctttttttctctttccggcgaatttcggctctccaccggtaatagttctttttgaatgcatcctctgtgattgaatcaattccatacatagtcatgaaattatgtatcgcattgatataagtgataccataggtatgcttttgttcgtccaggaagtcatgggcttctgcccataacattcgatcgatctttcgtacgaggataatctgtgaacgtattcccagataattgtatgttttgggatttttgcctaaactgcgttccggcaggataatttctagatttccatgatcaatgacgttgcatggacgtcgttcaagtaggtcgtagataaagtggtagatatccgtattatccggaaaacgaatcggagagtcctgcatattacagaactttccgataagatactccttaagatgtggtggtacttcaatcttagtagtaatcataaaaacgtttggtttaggtatggagctaatgtacaaaaaagaaatgaagaaaccttgtatatcaatgaaaaaagagtgtattcagtgtatcaccctttccaaaaccgtactatttttttgtgcgattgtgcaaaataactatgaacttttacttaagtgctgaatatcaatttgttaaccccgtacaaaatgatgtactttttggcacaaaatcattgttttgcgtacaaaatgcatttttgtgcctttttgtacgaatcgtacgtttttgtacgaaaatcgtgcaatgtgtaaatatctgatttttaatgtaataaatgaagaaaaataggtgtctgcacgaaagcacaaaattttatcgtgtttttgggtagggtatttttaaagaagaaagaaaaataaaaaatatatatatgtgttcctgattttgtccggcacttcctcctgcacatttgttcaaaacgtttgtgataagatgaaggggaggcgagggggaatgaaaaagaaagcccggtgcgcagaagcacaccgggaaataatactaatgctatatataacagaaatgaaccgacttgcgttagcgtaaatcatcaggataaaacacttgagaaatgagttcgtattcgcgaggcaaggacttgacgccgactacaacacaaataccccttgcggcaagctcatacagcctttgggtagtgatgatagaactgcggaaactatagttgctgcatagcacaaaataagcagtagccaggtctacggaataaatatctttgcgtattatctttttggcatcggatgggacttttgcaaagccaagacgaacggccaggcgtgatataagtaactctcgatcatcggcagacggagcaacaatcaccattattttattctctttttttatcggcataatgttgtgtatatcaatgaaaatttgtatctttacaaagtaataatttggaataatctactcatctgcgattcgagtagaagtggtgccaattaacagccggtactactttaggtacgtgccgaatagcactgtaatcatcagaaaactctaaaaaatcatctagtacgtcctttcttgtcgtttcttctataatatacatagcagctattttaatgaatagatcacgtgatgcgggcttgcagtgttcgtcaatgcgaatactgctcccttcaggtattgcagctaggatattattgacggcatggtagaagcgcataaaacgttccggattctggtgataaacaggaagaacttcttctaatatctcttgatacgtaaatggcattgttatcgtttatattgggaatctgaccagctttcatgtagtagcctttcatgcagagagttttttcccgtttgtttataggtattttttcagttcttctcgatctataaaaaaagcacatgccatatacttacctggtaatccaattgtctgtgcttttgcatcatccccacaatctttttcagtcccaaagccaacaattgagccgcgcggatcatccttaacatcgactatggtagtggacattctcaaacctttattgtcatctgctgccattttcttaatagcgtccagaattttattaccatcattattcatatcttatttattctagttaagattttaacttttcgtatctaagtccgaagcacaattttatcattatgcgttgtagccaattcatagacttaaaaacgggaataactgattttgtgtattcatgtaccaattgagctactgctttaggttgatcaatgagaaaatgcgtattattatcgttcataatattcctttctaaattattattaatcaattggtaactcttgaatttttctcataatatccgtaacttcgtctgctgtgatataacctattacatcatctgttattggtgtagcatagcataatataccatctttaagtattccaacctcataagtatctataccattagaatagaacatagaaccgaatatgacgctaattccataaccgttttcaaaattcatttttgcctgtttagcttctgcatattctttagcaagatataaaggaagtttttgagcttctcctgctattggatgcggaataaataccaaatctttgaaattctttattttactcatatttattctaatttgaatgttttgctgcaaattctatcaacttgacaagaactgtcactgggtgtccgtgaaactcttcagtcggttcgccactctccatatttataactattcccacgaggcttctgcgtccaaatccgtcgatttcaccggggtgaagcattatcccaaataatgttccctcatgattgaaagtgctcggaagcagttgaagaagctgtgttgtagaaaatgaggcgcaataatcttttttattcgccaaagtactgtctaatgaatatgtcccgctactcaaatggaaagaaaggtcgctcatagactttggaatcccagagtttattaaaatctcggaatctcgtgccccagttcccataatctttcgggatataggaacacggcaataacaaaccctgtcgtttatacttggttttaatactttgcttattattttattcatatcctcaaatccgcaactacgcgcctaatatgatacagaagcgaaaagaatctgcatcgttagtaaaaagggggcacagtgcatcgaatgtcaccataaagacatataaatgccccttaccccaccatgcgacttgaggcaatacgcaaaatcacgactataagttgtcggtgttatccaaagtcattctggaacacattggcataagcattgttgcatgaatagatattcagcacatacttccttgatgtcctgacccatttggctggcacagagatgaacttaaagacaaacgtcttgatgcggcttgttgctttgagtccgaacctcttcacgtcaagcctcgccatgatgaatttatagaagttgcgtatgagtgccataagcagaagaaacaccgtgttttctcccataaaggattttggaagcctgttccagccgaatccgttattcatatcatcgaagatgcgttccttccctccacggaggttatagaattcgacaatctctttctcggaagactcgtagtcatttgtaaggatgcagcggtaggtgtattctccttcccacaggtcgagttcgccgtctatccgcttctgtctttgaatcacaagacggtatgccttccctttccatttctcgatgagaatggaggccagctcaaactcaatgccgcccaattccactttcttccaacctctgagggcaaagatgtcattgtagagcgaactgcatcggttagcacggatatagaaggtcttgcagtgtttagcaatctcttccactatctcttcagaacacgagccgcaatcagctctgaaacggttgataataagcttgttttgttcaaacctttcaaagaacctcttcagcgtgtccttctggtggaaacggacatttgtgttgccgtcgctgttctcaatgccgacaatcaagttgccaataaccgccacgccagggcgataaccaaggaacttcttgtatgtaggcttcgcatcaaacttctcagcctctatgaactggtggtcgaagtcaacgtcatacccctcgccctctttcagctgccctgtggacaataggcaattgaggagcagtgtattcagcttgtctgccgtgttgaagtcgtaggtcttgccagtgtcggatgtgtaggaaatgttatcctgggtcagttcctttatggctctaagaatcgtgtcggcactgcatgtgcgaagtgtcggatgaagcgaaaggtggtacatcagatgagtggtgacatcctcgatgcatgagccgccacaaaaataaacgctcataagcgaacggatgatttcgctgtattgataaccatacagcctgcatctcataccgagggttgagtcgattacagatgagagtctggagtcaaattgctccattattgaaaatattcctccaaaaggagtgagtttctcggatttaattgctacctttgccatgtctgtcgggtttgatacatattttgatttgcaacactaagataggtgaaaaatctgacatggcaaattcctgagcaactttttgttgctcaggtacttaaaaagttatatttgtaatagtgttgcggaattaaggcatatctattcttgttctggatatcacttttggcaatccaaccaattcaaagcactctgtaagctattagtataattggcgttataaatataagagacttcttcgccctgcctatattcacgatcattgtctgtttcgcctagaataaactccatattggtagttcctaacctaaacacacctatacagtaggttacaccttcacgtttcttactctttttgagtcctaatagaaaaattccttgtttttctgacataatattattcctttttaagtttaaaaatcaatttgcttttgttcatattcagagtttatatcatctgaatcattattaccggtataagtacctgtaccaactgtaaagtattcgactccaccggctttgtcgtcaataacagggcgtccgtcttggtcgacttgaaaaggatatcccgttttgctatcatatttttgcggattgaaaatatagcctttccattcacagtacatgataaacttctttttgaatgcagtgggagagatgaatttccgttgtgcgggatcatacgtgcaaaaagcatcatacaaatcttttctaggaagacgtacattaagatgttcagcgcaagagaagtactcatctgcccaggaaatgagagtttcacccatttcttgtcgtaacttacgctgttctagtcgttcgcctggcgcctgtattaccccaaaattgagatatagctgaatgcagttagctaataagttccaagtaagattccattgatcgaaatcccactcagaaaagaaaagagagccgaaatcgtcaaccggtttatgattgtcattgtagaaatcggaaaatgccaacaaccattgcctgtctttaaatgaagaaccgctaccttttaatgcatgattggtcgcaatatatattttgggagaggctgagaagggtatagtaaaccgcccttctcctttgtgattaacactccagtctcctgtgatattaggaaacagaaactcgaaattgaaattaagcaacacatcatctataaaaacgattttcgtgttttcttgaatatcattccaaacaaattgatcattgaatatatctggtcgttttcctggaatgtagacagtgggagtgacatgtctcatgagttctccaagtaaagatttaccggaacgaccattactttctccgacttcggattgttttccatccatgccaactaccgccctggctacattgttatccttagcttccattgctaaaaaaccgatagcacagagcttactcaacagatgcatcttgttttcggcattttcatccgattctacttcttgcgctggttttcgccatgtgaaatttgatgcgttttggagaaattgaagaaaatgacatttttccccttcctcagaaatctcatagaaatactttccttcagcatcccgtttgaatgtaatgagcggtttaccgagatatttagctttgatttgcttacgttgttcttcccagatgtggtgggtaatgctttcatatcccatttctaacaccttatcttttgtaatgtaccaacaggcgctgtcgaagtagaagtattggctttcccggttaggttttataaagtttggttcaatgaaattcaataatgataatttgtccggaccaacatattgggatacccctttaataagcatttcattcacttctttcttgcagtaatgttttgcgaactgaaacaaatagtcacgcgcatcagaagcttcaatcatacgaacgacaggagggtccaactgaataaaacggaatgacttgtctaacattcttaggcggccaaatcctctgttttgcaggaaattatgtgaattgacatagcaaaactggtattcaatgcgcgtatctcctcctcgaatgttcttttctacttcttcccagaatttttcatcatcatcgaaaggttgtgctaagacaactttaccactatcatcgaatttccagcgatatcttccgaatacaaattccggaagattttttagtacatctctatgtctctctgcaaaagattcatacgaatgcaagcaccataattcttgaagcttgtggtcggtccaagtcgtgatcttaaacatttccacgtatttgcccagacctttcttctcgttacaggctgcttctatatcttttgccaattcttcctcatgccctttcaaactattggctaaaaggtcatccaatcctttatctcctgctttattcttttgtatatggccaataaatatttcaacataaatattacgatttttcaaggtacgcatatattccttgaaattacgggctgcaaagaaaaaacaactaggtcgtttctcgactctgtcattgagtcgaatgtttgtgctgatatcatcccaatcagagtcgaagataaaagcaacctcctttactccacaagttgtaatgatccgaacgatatcttcagggagcgcaccatttagaccgagattctgtataccgctaacagcgatagacggaatcccgtgcttacaagctttttcagcctttttttcaccttcctgaatgtagagccggtcaaattgttgcttctctttataaagcctccgcattcgttccgggatgtaaataggggtgccgcttccaatcggagatttgtatttgaacggcttgccgtctttatcaagatgtgcgtcaggaaattgccaacggattcgatagtattcttttcgttcaccagtctcttttttacgatgatctttcctggcataagtgacaggcattccttcaagatcataatactcgataataacatcatcacctctaggatctatggttccattttctgcgagtgttcctggacgaaaagtgcgtaatttgaatatagattcgttttttcctgttttatagacatttgctgtgacgtcttcaaatgtcaaacccgactctgcaagcatttttgcacagaaactattaacatcatttcctttggcttttttgctgccttgcttcatctttaccggcttctttttttgttcgggaactgcatccagtaaaacactgaatttgccggccagatattcaagcgcttccggaaactgttttccttctactcgcattaaataatctaacgcaccgacaccggcaatttgatggcaagagaaacagttgtaaatatccttagcgggatttacactaaattttttagatgccttgcaatgcggacagtcgcaaacgtaacttgtcccggatttgcgtaggttctggaagtcttgtaccacattcaatagatgcccggttgatgcgtccttgatgcgtcttatatcatcatcagtaaaaaacatagttatggctttttattaggtacgtggaaaacatattctttgaggtgcaaatgaagttgttttttaagggtttcaatgggacgggataaaagttgcgtatctgcctgctgaattatctctaagagacgttgagcttcttttggcggaatgtcatttatagtgagtaaaccacgattatcaatgtctacgtacataacattatctttttttgcgtccgcctacggctttacggtgataattcaacttataccgttgccgtagtttttccgcatattcggcagttgcatctttgggatcaacgaggacttgcgttcgggcatctattcttaataatatcttatttgattcctgcaaggcagattgctggcagagtgctgcaacttcttccggagcatctttttcaaaaagatttattttttctctttttgcaggattgctggatggactgggagagtgtacaactttcataatttgcttttataaacctttgattagttcctcgatatagtcttttaaataaggaggtacttctttggtgtttgctttctctttttcttgaaactgatagtattcacttgctgttaaaatgatgttgcgtacctcttcagattcttgcattatctttattactgctggtatgatgttataaggagaacctactactattgctggggtggcaacaagttcttgctgcttcttatataagatacaaattgcactcatttcatttgacttgagaatgttagagatgtgaattgtagtagcgaagatctgctcttttgtttcttttaaatttttcatgacgtttctttttttattaataatagaaatgtgggtattcgggaatcgaacccgtctgcggtgaaatgttgaaaaaccgttgtgcctccttacactattacccatgtgccgggattctcacccggcaatttttgtgtaacaaacctaaccaggggctgggtaccctacatgcctccttgagcacggcttttaaaaggttgataattgaaatgataaacttctattttttcattaaaataataatgtataactaaaacaccgggcttttcccggacgcactccttatgcgtatcttgattaaataatgtatggttgattgatagaagtttcttgtcttctagccctatactccgtacggcttcttcgggaacgtctggtagtataaggtgagtctgtagaaattgagatttctccactaataaaaatacatagtagtatgacggatatttgtcttcgaacaaaaggagagaggtccaaacttatattgtggtgcgtacaaaaccaccatgcagagatttcattgattttgtttaatcctaatttttctttgaccttccgaagggtattgtctacggtacgcacgctaatttgtaacagtgaagcagtttctttatatgagcctccccatgcgatacattccgttacttcattttcgcgttttgcaagtataacatttaagttcatagttatatttcttcaatagtccaacagtctgttatatcatatttcttaaaaacatctgtgatcgcagagaatagagtcacagagatatcaacaattccggcgttcagctttttggagaagtacgatcgtgagggattatttaaaacctgtatcaagtctgacttgagtttgtctttatcttctaaagagacttgcagatatccttttttaaatgaatagcgttttttcgctattgcaggtgttctagttttgttgtacatttgttgcaataattttgaaatcactgtgcaaatatagagcataaattctatataagcaaaataaattgagaatattttctatgagtgaagaaagatttatagatagactggaggcttttatgaaagctgagggactgaatgctaataaggtaactgtcgcagcagaactttctaatggtttattagggaaagcgttgaaaacgcgaggatctatgaactctgatagtgtagaacgtattctatgtgcttacacaaacttaagtgccgaatggctaatgactggcaagggtactatgtatgtgaacgatctgcctggagacacatttaatatttccaattcactgaacaatgatagtttggttttctttttgcgtgataggaataaagaacttgaatgtgaaaacaggagattacttgtcgaaaacgcatcactgaaaactagattggagttacttgataattccgaaggtaaaactggatgaagattattaaaggggggaaattccccgataaatagaataaattatatgaattaaataactcccaaaagccagtaagagttttgattccttttacatttgtagctcagttgtaagataaattcctgcatattagtacttaaaatagtacgccaggaacctcaagaaatccttgcaactaactgaaattcagtaaaagttgcaaggattttgcttttaggattaataaagaggattaatctctaatgaagttctgaatcgccagatagagcgaatcaaggagatagaatagttattcgcttgctcgtttcagtctttccaaaattacctcaacaatactgtgttatgctatcatctatcccgaacttacattcttataaagcaacgaaacaaatgggcatcgtttttttcatttgtgtagcgaaaattggttgaatctatgaatcgtataaaaggtatactttatgcggcggtatcctcctccacttttgggctggctccgtttttttctatcactttgctattagccggtttttcggctttcgaggtactttcttatcgttggggagtggcgtcgattgtattgattgtgtttggttggttatccggttgcaattttcgattggctggaaaagattggggagttgtttttctgttgagtttgttgagagccgttacttcatttagtttgattattgcttatcagaatatagctagcggagtggcttctaccatacattttatgtatccgttggctgttgctttggcaatgatgtttttcttccgggagaagaagtctctcttggtgatacttgcagtattgatgtctttgctgggagcagctttactttcattgggagagttggaggcgaaaagtggaaatacaatggttggtttggttgctgcctgtgtttctgttttttcatacgcagggtatattgttggagtgcggacaacgcgggtcgtacaaataaactctacggcattgacttgttatgttatggggttgggaactattttttacctcataggcgcctattgtacttccggacttcaacttgtgtcggatggatatacctggctgattattcttgggctggcattaccggctacggctatttccaatataactttagtacaagctattaaatatgccggacctacactgacttccatcttgggtgcaatggaaccattaacggctgttgtaatcggagtttttgtattcaaagagctttttactgtgaatagcgctgttggaattatactaatcttgttggcagtaagcatagtagtgtttcgcagacaaaaatcctgaatgatataatcaataaaagaggctgtctcaaaaatcattttgaagtgcaccccaaaagttttttgtctaacttttggggtgcacttcattttgagacaacctctttttatttgctctaaaatgtttacgcaactatatactttattgtaccaacgattgtgtataatgattggttataccaataataacgagttcactccaaggttaacttttgctcaccgtacttattctcttgatttagctgagagaaatacaaaatgtgccacaatctctgtctatttggcagatattgcgtcattaaagattatttgtattaattggtactgtttttgaaagttttcatcagtgtcatcggcattccgttttgcttaaaattcattttttggatataacggcagtttacacctatctttctgaaatcaagatggcggagttccttccgttgaaaagggaaattcacatgtttaactaaggaaaatgctattatgggtatcaaaacaggtccaaaaagaattgctatttccacaggaaagcctgaccgtcgtcaaagagacaacaagcagactccaggaaatacaccatctttgaaaccccatattcataagaagggggattaaactccaagtaaaaacggatgcctttgtctgacatccgtggagtaaaatgttaatgttcatcctcatcgtgtagcagcacaattttgaggtctatcaaagcttctgtcattttgacatcatgacggtggcttttttataatggtgcaaatgtaacgcatcaagatgaaataggttgtgttactctgaaaaaaattaagatttattgtcattacaattatatcattctacaacatttagtttcaaccaatcttcgagtaaacttaatcattttctttatttgttgtttcttcttgtttctcttctgattgattatctgccatttttgcaatttctatttgcaacgtattttccaacgtttcattcagggtttctgtaagagttttcatttcgatacaattttgatttgatagaatatgtatttactctcataaaacaaataaaaatctacgttttaatgcaactaatagcctaataatcaattgctactattttttgcgaaaattcttaagatttttcctcaaaactgaaatttccagcccattgcgtgtacaatttctctattaatcaataattgtacacatgaaaccattccactcactactccaaatgatagatactctgcataccgaagaggattgcagactgtatcttgaagatatgcggtggcatggtgagcctgtttgtccgcattgcggctctatatctaaacaccactataaactaactcaaaaaggagagttcaaaggtttatacaagtgtaaagattgtcgggaacggtttacggttcggattggtacaatgtttgaagattctaatcttccgttaaagaagtggttctatgctatttttctgttcctttcgcacaagaaaggcattagtagctgccaattggcgcgtgatattcatgttacccaaaagacagcatggtttatgctgcaccgcatccgtcataacataaaggatgatgatgcaacttttgatgatatgactcaaatggacgaaacctatatgggtggtaaaagtagaaatcatggtaacggaacacaaggtcgtagcctcaaggaaaaaacacctatattcggtatggtttcagacggtcttgtttatgcacaagtagtgcctaatgttcagaaaactactttataccctattatcaaggaacgtgtacgtgaaggttctacaatcattacagatgaactaaatgtatataacgcattaggtaaagattacaagtataagactattccacacaagcaacatatttacgctttgaacggatttcatacaaactcaatagagggattttggagccacatcaagcgtggtatcaaaggtatctatcaccttgcaagcaagaaacatctttctaagtattgcaaggagtttgtattccgatacaacacacgtaaacaaacagatggcgagcgtttcaatgatttcttaggcgggtttacagagcgtttatactacggagaattgctgatgaaacctgaatgggcatgggaatcaaattaagaaacaattatataagcagtctgtgatttgtctaaagcatatttgtctgtttcctccttttttgtttactttgtacactaactaaaaaaggaggtataagaacagatattatttctaaatagacatattgcataacttgcagacaattatttgacttggtaaaatctggtaaattttaaatgaagttcaaaataatgagtctaagcatagtttgtaccctcaatcgagggcgcagactgctttttcttatttgaacttcgggcttaccagagccttaccaatcaatgaggaagagtatgtttgtgcccttttcttgtatctactcatttgattatccaaaaggcaaaacccctaaaaaaactcttctcaaaaagaccgtaatacatatattaaatattaatcattaaagaaaggagaaacctatgggtaaaattgcaacaagagcattttgtaacacgctcaaatcgggtgcatttagttcggaactaactcgatgtccgacaaggagtgagatagaagctgtaaagttagctgtagctggaaattattcgagtaatcaactcgtaatggaagaagatataaaaaatcttatttctattatagtggttggcgaagctggtaacattattagaacacaagtgtaaatagaaaaacaagaaagtgcctttgaaaggagcaactcgctttcttgaagatatctcatcccagtggttgcgggataactcaaagaaaaatgatgcaaataaaagtattttgtatggtggtgctatgcgcctttttgtttattgcgtgtgaaaaggataatgatgattatgaacctattaaaccacccgtagaacaaccggaggaacctgttaaacccgaaaagccagatgagcccgagaaacctgaaaagcctactacaccaccggcaacagatgatattattaatgtaaaaataggagattcaaacatgatagtaggaagtaataactggaatgccattacgtatggcaatggaaaatatgtagctgtgggagaaaagggatatgtaactatgtccactaatggtgttgattggagtaccccaaaacaggtaggttcgaaagtttggcatgccattacctatgcaaacggaaagtttgttgctgtgggggggagtggatatagtgggcaaaaagcatttgttacctattctacgaatggtatagaatgggcaaccccagtttcaataccctcattatatggagacttatgttccataacatttggaaatggaaaattcgttgctgtggggtatcatgaatatggtggaagagaatatggttatgtaacgacttccactgacggcgtgacttggacttctgcaattaaaataggagaagatacagggacgcaattaatgtctgtagcatttggaaatggaaaatttgttgccataggggacggatatgcaacaacatcagaaaatggaattagttggtcttctttaacaagaatttcatacgacagtttttattccataatttatgctaaagacaaatttataatttgtggttctaatactgttatctatacatctactgatatcataacatttgaacaaagattcgcaaaacctggaacttctagtttaatatccttattatacgacaatgggtgtattgtggctcttagaaaaaatggatattatttgttatcatcagacggtatcaattggtcagaacccgctcaaataacagacgagtcgggcaaagtagttacagcaatgctcaatggtgtttgtgctatgccatagacaatcgaactctatatcaaatattagtagggtatgctgggaaactggtatgccctttttgttttgaaaggaatctttatataaaaataaggatagccaagtcatgatattatccaataaaaattcattcctatttttttatttcatatatttgtttgcaagttaagatattcaagactaaaacacaaagagtatatgagtaaatacgactttacaaatattgagaaccaaatagatatgacagaatctcaattagaagatgaaattaatagataccgaggtcaaagcaataaaacatcaacattgctaactatttttggaatattgtttttgtttattcctcagatatatctattttttacaaacagtttttctatttgcaaatggtatatctggattgttttaatattatatgtgttatgtggtattacatcaattatattattcgttgtgtttttatggccaagtaaagtaccacagaaaagaaaccctgaattcttttatgctgatttaatgaaacaatattcagatgatggttatgacgtggaagaatcaaacaaaggagtacaatattcatatttgggacatattaaacaatgtctgattgattatagacagatgaataataaaaaaggaattattcatttttggacatacagatgtattattgttactgctttatgttacctttgtatcgttccatatgtcatttcacatgaaaataaagaacccttaaaaattataattatgagcaatggtcaagaagaaaagaaaattatgaaacctgaaaatgtaatacaggtaacgcctgttaaagttagagaaggttttgcaagaaagaaggaagattctgtaattctcgaaagaaaaagagaaataacaccggcaacggaacgtcaaagaagtattcctgaaaaaaaaggtaaaaaataagacttggttgaaaaaaacttggtatcagaaatggatatcaagtttttttcttataaataatgcaacgtagacaaaattgtggtaatcaatattagatttaatcattcattatacacaatcgttggtacaataaagtatatagttgcgacaatttaaggagtattctcaaggcatggattccttatttccttcccgtcttgatgaaaatatttcttcggatgctccggtcaggcttgccaaccagctcgttgatgagtttgacatcagtctgttgttatccacttataaaggtggttgttgtcctgcttattattctcgcatgcttttgaaagtgctgttcttcgcctaccttcctctattatcagttatccgaaaatccttacagcattatatcaaggatatctattatagtctaaaatatctgactcgtaacacttttctatatactattctaccataattatttttaaataataatattgccataatttcacgagttgaacctactcctcctccctttaccatattaaaccaagtaagaaagccacctctcgaccagcaatcttcaagaaatattgttccacttgtgacaagattaaaatcaatatacaaatagtttccaccacttgattctaccctccgtatcttaaattcgtcattattaactaacgcttcttgatcttcatactgcggattaggaaagaaatcaaggctagcagtaaatgggttagtatattgacttacttcaaaatttggagtatgtggttcaaactcgaaaggggctgtggcatccatattcagaaaaactggatttgacctaataccctcagcattaaatactctcatatagactgtcactttattagttttttgtgtaggcataactccccaccaaggatcaatagtttgtgaccaatccgaagtcgagctttcactatcccttttaagtttccattcatactgaatatttttcaaaaaagtttctgcttttgagtctatacatctggcagacaccatataagcgctaacttccatacgccattcaaggacgaatgggggaaacccaaccattatcttcttatggaacttcgttgtaacattattaataacacaactggcggtaatagtgataacaccgtacttcttcatcgacagcgtaccggtattgtctacagtagctacagactcatcagatgtattccatgtaatattgtaattcatcgtattattacgtatggtgtaacggctaccgtcagtggcaacttctggaccgtccacagtaaccttcatctgctccagcatccagtcaagcatagtaggctcgaaagaagtatggtaggtagacccgtcggttatatagaatgcgtcgaacggggtatgtttggggctagcaggtggaaaattcatcaaatacttcttctcataatcactttgagtcagttcaatcttaccctcaccgatatccagagagctgactgtagggataaacatcagtttattctcaaaattagttgtaagattataccgggtaaagagctggacccatctttcggcctggtcactgcttatggcagcaccattggcattggacagttcataataggaaccgggcatcttgtcatagttaatcattgataaagggtaatcccgctgataagaaaaaagagtccggcgaatcttgatcatccaaaagaacttcttcacataacgaagatacatgttgcatactgaacgaccgtcgtaacctattgggtttgcctcaaaatgtagaagtaatgttgagctgccgggaagaaaaccaagcaggaacacttgccagtcctgaagagcgataccaagaaccgaagcaaagaagttgggtgccacaaactccatcaagatatccgaaaggattttggtcgaagccctgccatcgacatatatataaggtttgcggcaatcaataaccggtgtctggccgttacttatactgacgacacgcatcttgtatccgttatcaccctctggatagcccatcttggtgagttcacgctgccaaacagtatgataggagttgtctacgttcccattgtcatcaacatagttgataagcatctgacgggagcgttgctataaagcacaggagatatctgttctgccaaacaccgttcacctcgttgtcgaaaacctgctcattctcgtaacgtataagatgactgctcaatgcgtcttcacgaatatatgaatactggtacaacacgacccctataatccccttacctcttccagaaagggagtgttgggtggcaagaacctcttctgcattgaaaggcttggcacccacagaggaggagcgaacggtacgaagaagattctcgaaggcgacacgatccacataattgctatcattcaattccttgccattataaatatccagatcagccaattcaaaggcatagtcacgaagaagaccatgaggaatcttactcttgtcaaggtgctggaacatgttgtcaagccagttcctgacttcaggggtatcttcaacaaaatgtgattgccctagtgccgacatgtagaatatgcagcacaacagaaaaattatatttttcataatgagtagactttttacaaaatataatcaaataatcctgatgtatagaaagttctattcctttcaatgttatatccctcaaacttcccttctgttactgatgccttatatgaagcctgtggaacacgtttactcgtaacctcagtttcaaaattaaatagaccaaagatttcacctttatctacattaatattagtaaactcaatataccctttgtttacaatgtcagtctttagaataatcttcttttttctgatacttttagggataagagttgtatctgaacattgataaaggtacggagttacttcaatggacgctatataacattcatcctcaaaatcaaatggaccattgttatcaatatgttccttgaaataatatttctctcccaattgcggtagtcccttttgagtgacagaaatatatatcctataatttccaccttccttatcattaatgcctttagctatattgaaagtaaaagagccatcgtcataatatgaatagttcatatgaaaacttgtcggagcttcaaacattgttcttagtccttctcccctagcacatttaccatttataatacattcaacatagctgttattttttaataatgattctactatatcttttttacagccactgagtgacgataatattaaacatagtattgtgattagcattaactttgtacttttcattgtaaagtgtttagatcatcaactatttttagataatggacatacaagctatccgggatagtaagatcaatggcttcttctttactcatattaagtatataagcagagtcacgataaataatctgatccatcagcatgttttccaaactagattgctccttatgtagcttttcgtcaggagtaagatttaattgtgtagatttgtcaattgaaatgccactattggcattttctactatgatatcagagtcattacacgatgataccaccaacataaatgttaagactagcactagctttgtgttcattttcatagttgtgtaatttaatagttaaacatttatttatgtgaaatatattattatgtatagtcaattgtcataagtcattatgtattagaggtctatatttttttaaaaagagattgtttgtgtaatttttaaacatataataaaggtaataaacttattcaatataaaaaatattttaatcactttttttactattaatcataatgccatttaaaaaatcgacttataatcaataaatgttctcttaatatcaacggatattattataattggaagttattagatattcactaagagtcaatacttccagaaaaatgttgttctattctagcagaactagtagtgtttcgcaggcaaaaatcctgaatgatataatcaataaaaaagctgtttaccatacggataaacagctttttattggtgagcctcttgtcggattcgaaccaacgaccccgagattacaaatcacgtgctctggccaactgagctaaagaggcgttattttcttttgcgggtgcaaaggtatgaaatacttttaaaaatgcaaatacatcgtatactttttttatatttgcattctcactaataattataagacaatgaaaaagaaaattatgaatgtgtgtggtgtggcgtttgtagctgtaagtctattagcttgttccggtcagaagaaaggaatggctgccactgaaatggcatcggatagtacgaaagtagttggagacgtgataactactcaagcagatagcacgggatatatcgtgaaggtaggtgaggcagcaccagactttaccataactctgactgacggtaagcaggtgactttatcttctctccgtggtaaagtggtaatgttgcagttcacggcaagttggtgtggtgtttgtcggaaggaaatgccgtttatagagaaggacatttggttgaagcataaagataatgcagactttgccctgattggtattgaccgtgacgagccgcttgataaagtgctcgcctttgcaaagtctaccggagtcacttatcctttgggtttggatcccggtgcagatatttttgcaaaatatgcattgcgtgagtccggcataacgcggaatgttttgatagataaagaaggaaaaatagtaaagctaacccgtttgtacaatgaggaagaatttgcttcactggtgcagacgattaatgaaatgctgaaataggataaagaacatttcatcaggtggtatctcaggaagaatcgtaaaactttcgtgtacaataaaaatagtaacgctatcacaacaggatagcgttactatttttaggatatggcgatactatcgaaagagcatcccgtcactattttataaagagcattctaaacaatgctaagcttagccagataatcataatgctttccttctttcacaagttctgctttaaagccacattcggaagcgtataggctaagtgtctgaaaatctatatataaccagtcgaatgtgtctccttttatactcttgtattgcatccggaaatcaatttctccgtaataatctccggctaagtcgataactatgctgccgtcttcttcttcgaacagatatcgtaagtcgctggaatccattaatatacatccgccggggcggaggatacgtttcattcgtcggaaaaaatcgggcatattgcttagtctgccgatgattcccgagccgttcataagcataagaatggtgtcgaatgtttctgtgaatgtttcatcaaagaggttgataagacgggaatccttgactcctcgttgcttcattacttcgacagatagcggagaaatatcaatggcacaaacctcttttcccatatcctgaagtgccagggcgtgacatccgcttcctgcgcctacgtccagtatttgtcctgtggccatttgtagggcagtacgttccagcatgggcatggagggcatggaacggaacaactccttgacaggaatttcatcttcttcgaattgagaagaaaaaactcgcaagcggtcagctctgtggaggttgaaaaaatcggagatagcagcccccattgggtctttttccgggatgagaattgttgttgccatattggtcgttacgattgttttagttggcaaagataaataaatccgtagaaaagggttatctttgctgccggaaatatgatattaataacttaatatatgagtatagaagaagcaatcatgggtggaattgtctttaaaggtaagaaagacaagccacaggaagatgaaaaagtgaagacaaaggctaagaaggcaacatatattcgtgggcaacatggttcgggtgcagcgaagatgaaagctgatatcaggaaaaaaagagcaaatcgacataaaaaataagaatcatatttgtattatttttgtttgcttttatataggaacagttattttaggaatatgctatttattttcatagacaatgataaaaaagcggggcaggataatcatcctgccccgcttttttatcatatgaattatttctgcggaagtatctcaatccaataatcgtccgggtcattaatgaaatacagtcccatggcggtattctcgaaacacacgcaacccatttctttgtgataggcacggactgcatcataatcacctgctacacgaaagcagagatgactctcgttctcacccaactcataaggagccgtatgatctttcaaccatgttaattccagaagaaatcccgtctcgttatctgtcaggtagacgaggatgaatgaaccgtcggaagcttctttccgatgatgttctttcaatccgagtgctttcccgtagaaggcaatacttcgttccagatcggtgacgttgatattaaaatggtcaaatctactttttatttccattgttgtgatctactttattttttcattaagagcttcacgatctcaccgacataagtacggggttgaccggcttgcggagtagtctgtgaggccagtttcttacattcaataacagccgaaggcgttgtttggttcggagcgtagagtttcagtgcataactgtctgccttttccattgcttcgtaagactggtcgggggaaagcgtgcagtaagcaacggctttaccggactgatagcccagtgcaccaccggcgttggcagtcatatttgtcatattgaattcgtcttttccgatagaaatcactaacttgccgcttcccattaaagcatatacttcacccggaatctgtttcaagtcgatttctacataacccggcatatctgccgaagctttgccgacaggagttgcaggagtcagatcggcggcaggaactgcattttgggcaggttcgccggttgtcactttgatgtcagttttcttatctgcaccgccaataacaatcgggcctgtggctgtaacgatcgacggagccttttgttcttcttctttcttctttttctctattttcggacgggtatccggagctccgaaggctacagctacatccataaatatatcatcggcaaagtctaccgtttttctacgccattttgccaatccgcggactaacttagtctttgttttattaagtgcgtatttgtcggtaatccattcttccgctttgtacttttctgtatcacggtatgtgaaacggattttttccagttccaccaaacagttgccgggtttgcaggtaacggtgatctggtagttgattagcgtacggtctaatgaaagagcgctggaactgaatacgatccactcttctccgataccggcaatggttcctttgtcttcgtcggcatagacaacgcggctatcaacattttggttttctttcagacgttcggtcatccacttcatgaccgtgtcatagatttgtgcctgactcattccgggaatctgaaattccttagagaatataactttgccgtctacttcggggacagctcccacgagatacctgctgtcgtcttttttttcttttgctgaatctgccttcattgctatcggcaatgcgaggaacagggtaagaaacaggattgtaaatttattcataattattatgtgtttatttggtaatttcaaaactttcgccccgatgggtgatgctgataaaccggcatcctgcattttcggcgaaattacgaagcgcattaccgccttcataatcttcactaaagtgcatgggcacaaatatagtagtttttatttgttcgatgaactgttttgcccctttcatataatcttttcccattctccggtccaccggaaacagcactaaatcaatgtccggcgctttttcttttaaatatttaacttctgcaaggaaatctccgtttgcttttcgtatctcttcttcggtagattcttcgctccagtgccagttgtttaaatcgccggcatggaaaacactccaatcttgcaggtgaatcaagaatgaactgcccacatccgtcgaaccgaaagcatcgatgcggagcgtctcgtcctcatatgtttctcctttctttatatagatggcatcttcggcttgggtacggtgagatttcagaatgtctttagagaaaatataatggatgtcaggccgttgttctttccaggtcaatatttcgcggttgaaatggtcggggtggaagtgagtggctaatacatagagcttacccggcttttgcaagaggtaatcatgcacgattccccggctatgttcggcttccgaggagtctttgtaatagtcgataataacggtgacgccttctgcttcgagggcgaaaccgctatgataaatgtaatccagtatcataagctgaatatttttgtagttgcaatattacgtattctagttgaagttgccaagaaaaatcgacgaaatcaaggggcaaggcgactgatttgccattctccattctctttcaggatatacagaaaacggtcgtgcagccggttcggtcttccttgccaaaactcaatccggttgggggtgacggcatatccgccccagttgccgggcctttccacttctttccctatccaatgggcggcttctttcacgaaagcgcgtatcagctgcatccggctcttgacaggccggctctgtggagaaatgcgtgcaccaatccggcttttataggggcgtttacggaaatattcatccgattcctccggcgggactttcgttgcaattccttctatgtgtacctgtctttcgagagcgtgccagacaaaagagagcgagatatgtggattctgttccaactgttttcccttacggctttcataattagtgtagaagataaacttcccgtcatgaagcccttttaacagtacggtacgcgtagaaggtttcccttcgggagacaccgtacctacaatgacggcggtaggctcgtctacttccgcgtcaatcgcctcttgtagccaccggctgaaaagcgaaagcgggtcgccgggaagttcattttccctcaacccgcctttcgtgtattcttgccggatatctgcaatgtttatttttaccataagattatctggcattaaattgttcgttcattacataggaacttcgatcaacagaatatgtgaatcttttaatgtctccagttcgaagttgttagtatcataaatccccattccgtcacggcgtttcatgacttcaccgtctacaatgatttctccttcaatcagaaagatgtaaacgcccgcatgactttggtgtgtatggtatccaagtttctttccggcttctactttgccgatagagaaccaggcatcttgcagaagggaagcgggagtgcttccgtcgggcgaaacgataactgccaattcgttcgggcgttccagttcactgatattgaagtcctgatagacagggcgtgtgttccgttctctcggcataatccagatctggagaaattctaccggttctacgggacttgcattcatttcgctgtggaagatacctgttccggcactcattgtttggatttctcccacggtgatgatgcggctgttctttttactgtcaccatgttgcagatgtcctttcagtggaatggagacaatttccatattcttgtgcggatgcgtctggaatccttctccgggtgccactttgtcgtcattcaatacacgaagtgcaccgaaattgatacggttggaatcgaaatattcatcgaaactgaaagtgtggtaactatccagccactcatatttagaatgtcctcttgtatctgctttatgtataactttcttcataatgttctcctttttcttgttgtttatatgtcttatgaacaaagagggtgggggaaaggttttatttcttcacttcatttagcaaaggcttatggttgataaaatctctgatattttgtaatgtcgtcattgcgatattctccagtgcttcgtgtgtgaagaaggcttggtgggaggtcacaatgacattgttgaatgaaagcagccgggcaagcacatcgtcgtcgatgatgcggtcggactggtcttcgtagaaatattcgctttcttcttcgtacacatccagtccggcagaaccgattttcttgttttttaagccttcaatcaaggcgttggtgtgaatcaactgtccgcgaccggtattgataatcatcactccgtctttcattttgctgatagagtagtcattaatcaggtatttggtagcttcggtaagcggacaatggagggagatgatgtcggaactatggtataattcgtctaatgaagtatatacgattttttcttcgcgggcgaagttatagtccggataaaggtcgtaggccaatatgttcatgccgaaccctttcagaatatggatcaggatctttgcaatctttcccgtgccgatgatgcctgctgtttttccgtgcatatcgaaccccatgagtccgtgaagggaaaagttaccgtccttggtacgccaggaggcacggggaattttccggttgagggatagcatgagagctacggtatattcggcaaccgcatagggtgaataggcggggacacgtaccaccgtgattccggcagctgcggcagcgtttaaatctacattattaaatcctgcacaccgcaatgccagtagctttactccgttggaagccatgatgcggagtacttccgcatcggcaatatcattgacgaaaatacaaactgcatctaccccttgtgtcagtaatacattgtttttattcaggtgtcctttgtagtagcgtatctcaaatccgaactctttgtttttatcagtgaaagaagattcgtcataaggctttgtgccgaaaaatgcaattgtataggccataatattttctgtttttattcttacataataaacactgaaatagggtgaattgtttatcctttcctatgtcttgaatataaatcgtttcattagaaactgtttggcttttcaattaaaatagggggattaatgaaaataaatgcacaattataccttctatgtgcaattatatcgtatctttgcgcccgaaataatttaaaaaagatttagatgagaaaaatttccttgattggatttgtgatgttaatcgtttcaattccaacttttgccggaggtcttctgacaaatactaatcaacatgtggctttccttagaatgttagcacgcggtgcttccattgatattgacggtgtttattccaatcctgccggtctggctttcttgccgggcgacggtctttatctttctttgaacggacaaagtgcttatcaaacgcgtaatatagatatgacgtttccactgttcccggaagacgggcacagacgttattataagggtaaagcttctgctccttttattcctagtttccaaggtgcttataaaaaaggagactggactgtatccggtagcttcgctgttggcggtggaggaggaaaggcttctttcgatgacggtttgggaatgttcgattcaatggtaatgggacagatttatcaagctgcaagtggcaaggttactcctaatatgtacacaatcaatagtgcaatggacggaagccagttcatttatggcgttcaattaggcttgtcatataaggttaacgattggctgggtgtttttgccggtggacgtatgaactatttcagtggtggttatgaaggctttctgactgcgaaagtgaaagcagacttgccgggtatgccggcaggtacggaattagcaggtatcgaattggattgtgaccagacaggttggggaattacgcctattcttggagccgatgtgaaactgggtaaatggaatatcggtttgaaatatgagttcatgacaagcttgaatcttgagaataagaccaagaaagcggaagttcgtcagatggggaatgtaatgggggatgaaggaaatccgttggctgattataaggacggtgtaaatacgccgagtgatattcctgctttattgactgccgccgttggttatgaaatccttcctacacttcgtgcaacagtagaatatcatcatttcttcgataaggctgccggtatggccaatgacaagcagaaagctttgaagcatggtacacacgaaattctacttggtgcagagtgggatgtgactaaacaactgacgattagcggtggttatcaaaatacagattatggattggcagatgatttccagagcgatattagtttctcatgcgattcttattcacttggttttggtgccgcaatcaaaatgacgaagcatttgacgatgaatgttgcttatttctggacaaactacaaggactataataaaatgacagaaacagctcttggagcttcatcaactacatacagccgtactaataaggtgttcggtcttggtgtagactacaagttctaagatttcataatccgacctttatatataaagaagccgtctcggacattgtcttgaggcggctttctttatttttttgtcttagaaagaatactgcaccagcatattcaaccggtttgcatggctcgttgaagaactgaaatcactgcgccagcctctcaggtattcgacaccgacttgaagattaccgcttacattccaaaaagcattggctacaagatattgccctttgcgatacgaatcggggtttgcactaggatagccgttttcagagtaaagtctggataaactgtacgttccggagacaaatacattcggcgtaatgttgtactgcaatcctgcataccaacccaacattggaagaacctgcatcttgccttcattgtcagggtcgggaacaaggtcaacattcagattgcttaaatcattcagataagaaccgatccctttaccataattgaattgtccgtatgcctgcaatttctttgtgatattaaacgttgtagaggcttgcaagccgaatccggtctttgagtaagccttatcgtgcacattgctcgaataagtcatattacggacaatcgcacctaatttaatatggctgctgctgttccagttgaactgtgcggaagcggcgaagtccggcattcgttgagtattgattgctacgtcattgttggtcgttccgtctaccgaaggcatttccatagaaactccgaatttccagtttttcagtttatcgcacatataacttagttgcgtggtacgatagaaagctgaaccgttcggaccggcgaagtcgatagtaggaggcagggccgaaaggtccataaacgagccgtagctgtatccgattgtgaaaccgaggaactgtgcataagcattttgcagttcgaaggtctttccgtcgccacggaagttaccggcggtataaaccacgaaatcaccaagatgtttggtgcgtcctaccagtttgagaaacagggtagaagtagtgatatccatttggaactggtttttggcaaaattaccctttcccggtcggccgatcaatgccggatagaaatccacatcgtcaacgattccattaaagtcatactctcccgtagcacgaacgtagccaccgataccgagggcgaattttcccttttggtcggtaagcaggaagcgaggcgcgttcgggtcatggaaacgcatctgcgaacggtcgttcatgatacggatgatttcatcgcccgctttatcccgtgagacaaacatgatcgaattgggttcctcatcttcgatgactactttcttttgtgcctgggcacagacggggaaaactcctatccccagtagcatagctaccattttaaagcttgttttcattataagttaagttttaggtgaatgcccaatgaacaactaaaaaaagaaatggttgaaaggccaaaggaaaaattgccaaactaatcggaagaattgctatttataatgattctaaaaaggcggatctttgtaccgtaccaattagataaaagaaatacgacgatggaaaaagtagaatttactcaaggaatactggcgatggaatctgatctgcatcgctttgcatataaattaacgtcggaccgtgactctgccaacgatttagttcaggattgcgtattgcaggctttggataaccacgagaaatttgcgcacgccaagaacttgaaaggctggatgtttacaattatgcgcaatattttcgtcaacaactatcgtcgtaccgtccgcgagatgaatattatagatgatacgtattctatcaatcagcaaagtctgatagaagatgaagacagcgacagatttgaatttgcttatgacatgaagcaactgtatcgcgtgatacattcgatccccgaagatatgaaagttccttttcagatgttcgttgccggatttaagtatagagaaattgccgagaaattaggattgccgatggggacagtgaaaagccgtttattctttatccgcaagcggttgaaggaagaactgaaggacttctcctgatacagttctttttaattgagcgatgtgttttaaggtcaaagtgaatgagccttcctgtctgaatgcgaaactgatggggaggcttgttttttatttccgtgttttcccggcgtatagaatctgataagaagaaagcgatactttcagttttattttctatctttgcaccccgaaagaattaaaaagagacgtatgatgccgtgaataacggtcgtgtattctagaacaccacgtaaaaaacaggaattatgaaagagaaagtatctgtaccctttatgctgctgggcattctttttaatgtgtgcctcattgcagccaatcttcttgaaacgaaagtaatccagatcggtagtctgaccgtaaccgccggattattggtttttcctatttcttatattatcaatgattgcatcgccgaagtttggggattcaagaaagcgcgccttatcatttggagcggcttcgctatgaatttctttgttgttgcccttgggctgatagctgttgcgatccctgccgctcctttttgggaaggggaggagcatttcgattttgtgttcggcatggcaccccgtattgtggctgccagtctgatggcattcttggtcggttcatttctcaatgcgtatgtgatgagtaagatgaaagtggccagccggggacggcatttctcggcacgtgccattctgtcgacccttgcaggtgagacggcagactcgttgattttcttcccggttgctttcggaggtatcattgcgtggcgggaattgcttatcatgatgtgtattcagatcatactgaaatccatgtatgaggttattatccttccggtgactatccgtgtagtgaaagccattaagaagatagacggtagcgatgtctacgacaccgatatttcttacaacgtgctgaaagtgaaagatatataattgaaatagagaacataaccttacccttttataactttatgaatatgaataaagaaagcgcattggtggtattcagcggtgggcaggactcgactacttgtctgttttgggcaaaacgtaacttcaagaaagtatatgctttgagttttctgtatgggcagaaacatgagaaggaagtagagctggcgcgagagattgctcggaaagctgaagtggaatttgatgtgatggatgtttccttcatcggaagcctgggacataactcattgacggatacgagcatggtaatggatcaggaaaaacctgcggatagttttccgaatacattcgtgccgggacgcaacctgtttttcctgagcatagcggctgtctatgcccgtgagcgtggcatcaatcatctgataacgggagtttcccaaacagatttcagtggctatcccgattgtcgcgatgcgtttatcaagtctctcaatgtgacgttgaacttggctatggacgagcaatttgtaatccacactccgttgatgtggattgataaggccgagacatgggctttggcggatgaactgggagtgctggatgtgatacgtcatgagacattgacgtgttataatggtatcccgggggatggttgcggacattgtccggcttgtacgttgcgccgggaaggattggagaagtatttaaaaagtaagaatcaataatatctctacatagagattaaaatgcattttttgctgtcacatcctgctgtcacaagaaagttcttatttataaaacggccgtaagtttcgtttggaacacgccgggttaaattagtttcagcagcttgaaacaatagtttcatcagtgagaaactaaagtttcaccgccttgaaactgtagttccaaaggcttgaaactaaaagtttcctataaggaaacactttgtttcaagccaagaaacattctgaaacccgtggggaacggatacagtagccgttggttaagagttgaaggtgataggtgatagatacggtgataggttgaaaaatgaatctatcaccacttaaatgtctgttaataagatgtttgttcctgtccggtgataggtgaaagaggaaatgcatttttttatctgggtagaggttgtagtttaacaagagtaatgactgaattaaaagaccaactttccttattgggaagaaagaccgagtataagcaagattatgctcctgaagtactggaagcttttgataataagcatctggaaaatgactattgggtacgtttcaactgcccggagttcacaagtctgtgtcccattaccggacaaccggactttgccgaaatacgtatcagctacattccggaagtaaaaatggtagaaagcaaaagtttgaaactctaccttttcagcttccgcaatcatggagcttttcatgaagattgtgtaaatatcatcatgaaagaccttattaaactgatgaaccccaaatatatcgaagtcacgggaatctttactccgcgtggaggcatctctatctatccgtatgccaattacggtcgtccgggaacgaagttcgaacaaatggcggaacatcggctgatgaatcgggaataataaaaaaggcttgtcaaacattggcattgcttatgcggcacttcttgaggaaatggataaaaggcaggatgatttaatgaatggtttaatattgtagaagatatttcggaaaaataatcttgtagaagaatacctgatgtagtaaagaagttatctgaagaattaggtgtatatttacggaaaaattatgctcaacgtctttcttttaaagagacgggggaaatcgttccttggccggatgaagttctataataaattatttaatccattaaatttatgaaacatatttttatgctatggaaagtactaatggtttgcctgttgttagcaaatccgttagcgtcttatgctgattttcaaccttcttattcaacggcaggtttttattcgctgcccaataccggtcgcacggtgtatgatatgaatcccgcctggcgtttctacaaagggaagatagaaggtgccgaacagaaaaacttcgatgataagaaatgggatatcgtatccttacctaatgggatagaatatcttccggttgaggctagcgggtgtattaattaccaaggcgaaatatggtaccggaaacatttcacacctgatgaagcctggaagaacaaacaattgtttcttcattttgaagctataatggggaaatcaaaaatatgggttaacggtaaactgctgaaagagcatttcggaggctttctgcctgttattgttgatgtatcttctgccctgaactttggtgaagataatgtggtcacggtgtgggctgataatagtgacgatccttcctatcctcccggtaagacgcaggaaacactggattttgcttactttggcgggatctatcgtgactgttggatgatagctcacaaccgcgtatttattaccgaccccaattatgaagatgaagtagcaggcggcgggctgtttgtttcttatgataaagtgtcgcggcaatcggctttggtaaatttggatgtgcatatacgtaatacttcgggaaagttcttcagtggaaaagtcagctatgaactgtatgaccgtgataaccgtcttgtgctttcaacagagaaacgattgtccgtgggcaatgagcatgcggcaaaagtggcctctcgtatgaaggttgacagtccgcatctttggtcgcccgacagtccttatctctatcagttgcacgtctatgtgaaggataaagccggcagcattgttgacggatatcgtcgtcgcattggtatccggagtgtggagtttaaaggaaaagacggtttttggctgaacggtgaaccgtatccctatccgttgattggggctaatagacatcaggattatgctgtgataggcaatgccttgtctaataacctgcactggcgcgatgcaaagaaattacgcgatgcagggttgcgtgttatccgtaacgcacattatccgcaagatcctgcttttatggatgcgtgtgatgagttgggactctttgttattgtcaatactccgggatggcaattctggaatgatgaacctatttttgcccaaagagtatatagtgatatccgtaatatggttcgccgtgaccgcaatcatccttgtgtgtggatgtgggagccgattttaaatgaaacctggtatccggcagagtttgctaaaaatgtggtagatgtactgaatgaggaatatccttatccatattgttatgccggctgtgatgttacggcacgtggacacgaacattttccgatccatttcactcatccggtaatggggggaggaggggcctttaatacggagactttgaatcccgatgtttgttactttacccgggaatggggagataatgtggatgactggtattcgcataattctccgagtcgtgtgaaccgtgtctggggagaagtgccgatgttgatacaagcgcagggatatgcaaaccccgattataaatatacgtgctatgatgtactgtatagaacttccagacagcacatgggaggttgtttgtggcattccttcgatcatcagaggggatatcatcccgatccgttttatggaggaattatggatgcgttccggcaaccgaagttctcttattatatgttctgttcgcaacgtcctgcggaggaaaacaaggaactgattgcagatagcggtcctatggtgtatattgcgaatgagatgactcctttttctccgaaagatgttacggtgtatagtaactgtgaagaagttcgtctgactttctgcaagaatggcaaacagcatatttatcataaaccaatcgataaggccggaatgccatcgcctgttataacctttagcgatgtttttgattttatgtatgataagcaattgtcgcgaggaaggaaacaggccgattcgtatcttctggcagaaggtctgatagccggaaaggtggttgcaacacataaggtgatgccggcccgccgcccctctaaaatactactttgggcggatgacgagaaggtgagtatgaaagcgaacggttcggatatcatgactgtaatagctgctattgcagatgataatgggaacatcaaacgattgaataattatgaaataacctttgaaatagaaggtcccggacaactgattgctgacagtaagacgtttacaaatccggctccggttcgttggggaactgcgcctgtattggtaagatcttctactgttccgggagaaatcaaggtgcgtgcatccgtggtatggcaaggcaaacatactccggtttcggcagagttgattattccgacttatcaggcggagcatattttgctggcagataaaaaggaactggaacgattgaattctgtttccggacagaaagcaatgagcactgattttaagggacagaacggaaacagcttaaagcgacagcagaaagtcagccgctcgaagttaaaagaggtggaaaaacaacaaagtgattttgaataataatgtaaaagaatcaatatataaagaataatctatgaatttcccccaatcatacatttggatattgtaagattgggggaactcatttaattggatttcacttcttttctctctccattcgcctgtactgcatatatcttcatgctatcattccaaggaatggatgccggaatatcaaatgagaagaaattagagaaatacattatctcactacctttttttacttcaaatgcgacagcttcatcacccgaacttattgtaatatgttgcccggaacgggtatatgttacattctttgtaatcttctggtcattcttgaactgtgtataatagcctacatcacctacctgatattgttcaatacccacatcattattctttctgtcttcaagataataaaatgcatgtttgggtgcaggaaactggctcatgtagctcactgcttcggcaatcatggttggtgtcacattgtagttccatttaccatactgttcaatctccacattaattaccggttcgaggaatccccacatcctgaagaattcagtcagattctcattggcagccttacttgccatcttagcaaaatgtaactgacctgctcccggattagattcaacaatacgatcttcccgcaagagtttgaagagtttctgccagaaatctgttttatagccacaacgatgataataattccaaagttgccagttcatacgcatatgtatttccgtatcctcattctgatgagtggcgctacccatattccaccaagcttgtttatcaacaaaacgggcttttgccaacgcgcttaattccgatcctctcgaacaatattttcccagtttaaacagtatgtaatttgagaaaagattattggatgactctgttgaaccgggccagttgatagcacgctggtgaatatgtcctatttcgtgagccggtccccaggcattgtctttagcagccatcacgttatcataaagcaaaatattgttgagataagtatatacgaatccaatcctataatctgatgcccacatatagctaccttccggagagatggcaaacaaatgattgttgacctgtgacggacggacgtcatcaatacccatcagttcctgttgccaactaatgatattatcccaaagattaatggcagacagtatatcgtagggaacagcctgcatcatcttatctcgatggaagtagaacataattctttcaccacgtatgcagaaatacttataagtagctttatttataagctctttatatttatcattagtcttatccgtttttacatcaaagaatccgctgacatatccgctacctaaaggaatatgtattttcacaggttttgcattgacatcctgcaagttagtgttatacataaggaacaacattcctcgctgtgtaaatccaagtttattgactccttcttcaaggaaacgggtttctccgcttgctgctgtttgcacatagtcgccggacttttcttcaccgatgcattgaatagacaaactctgtccatgggtgtcacctaccaacacaatgaccgaatctccggcttccacataaatacccgtagggttgtctaagttactgtatcgtttggtcatcagtgtttctgcccattcctctacattactgtaagggtgataatcttgtatacggaaagacttttcccattcgtcatatgtgtttctctttaattgaatggctatattggcaaaatagccgggaagtgcatttatctgtgcatcggtagcttcatctctcacctccgtacaagttatatctgtaaaaacgcccagcaattgtgcgtcaagtttcttatccggattcttttgatagaattccatttcatcacaacttacaaagtctcccaagccggagtgaacctcaaattttattttagtagctttcttcaaactctgagcaaacaccacacggcttgaagcattctgcatcttaaaatcgaatgaaccgtacttcgtatattcgggagcatcttctgttgccgtgtaaatatccaatttgccaaaattaccatttccactacgggtgtgataaatcaagtaatctatgtcttttgtgccatcaaaaaaatattcgagagtaacaggaaaattagccttttgattccaagttgaatgatagggggttccaccaaacttgccatcaaaagagttctcgattccttgtcccggctggtgctcactatcttttcctccattgggagttattttcaaatcaccttctatctctacatccgaaacaccggaatctttagcattttgtgtaactgagcataatgctcttatcttgtcgtctttagtatatatgtaagtgaatgtgacagtacgtgtttcataatatgggttggcatctaccgtatattggtattctttatctgtcagcgcacgggtggcaggaacagttttgatccagtcactgttttccgattgctctattgtgtattctatattcgaagtgacaataatggaaagaggacctccggccgcatcgattatcggattgggattcttgacaaggatagcaggaccgtaccctaattgacgtacttgaatagtatagttttgcacagaactctttaatgtgatttctgcagagcgtacgtccggttcttcattggcatgtaccaatacttttaccgcgggcgaagaacccgacatgtcttttgctgcgacacaccagtcctgatttgatgagactacccatgcgtctgcggccagattagtttccacaggtattacaagcgatgattgtttttgatcgaaatcctgttgtaaatactcctcttttattgtgaatacaggagttttatcacccggttcatcatcgctgcaagccaggaacaaagaagaaaagatgagagaagtaatcccccatagtaagaacagatattgcttcataaagtattgtatcatcaaaagattattcaaagttaaccataaaagttaatgagagagagaaaacattctctctctcattaaaatattacttaggagaaaaatcagtctgtgctcatccagaactctgcaaatgcaaaactgtttcctactgacgttttatctacttgtacccgcaaatatttaaatggtttgccgacgaataccggcgatgtatattttgcttttgttgccgttggtagattttctgtaaccgtagtgattttactgaaggcagtaccgtccggactaccgagaagagtatactgcagaggagcgccattattgttgttatgacgtatttgatatcctattgatactgctgtggattctttcggcagagcaatttgaatccagtgaggcattggtgctactccgctccagttactatggtaatacgtatcttcttttccgtcgagcatttcagcaatagaaccttcatttgtcggatccgggaaaataccaatcatattttctttcaggttgactttggttagtttgcttgcatcaggtacataagagatagcatataacgatgtatttctttctgtgtcgataacaaattgtggtttagtgcatgaagacaaacaaatcggaagcacataattaccataactcaaaccggtacggtctacttcaatatttgcctcttttacactttccatatcgttggtaaagttgacagttttctccagcgtgtaagcagtagaaggtaacattgcataatcacattcgtttgctgcattatattcgtctaacaatttcgaatcgatcgttaattcacaagagaagtcccatttgcttggaataggaatttccaatggcaaagtgaaattcattttaatagggccgttgtccgagaaaaagttttgagtatagccgctctttgaaaagaaaactgtcggagtttgtacatttggcttaataaaaacctttcctaattttgaattgatagagtcctgtgaattttccagttgcaatggtagcacatactcttcaccggtattcaaggcgggaagcccgtcaatcagttccgttttcagagtgatatccatagttttatacagttcatttgcagcaaaagtaaattttctatcgccattcaattcatagcaagtggtgggaatggctttgtattttactccctgttctgcattatatatagccaatgcagcatcatccatcgttcctatacttacttccgtcactgcgttgagttctgagcctcccttgtttatcacaacctggtagttggcatcttcccctgtgttatatacacttacaggtatttcgccactatttctgaaataaagtatagtactgaaatcatccagaaattcatccttgccatcttcgcacgcagtctgcgttaaaaggaaggcagatacgaacgacactaataatatattttttctcataaatattttctttttattaataaagtggttttatgtgtatttctcactaccatccatagtttctggtcagtaatttattacgatccaattcacgctgagagaacggatagagatagtggttggatttaaacacgcgtgtttcaaatacggttcttttccaaaatccgtcaggagtcactttcgtatcactgccttccagcggacaggttgcatccataccatacattggaccgttgtccgtttgctccgcaatcatccaagtacgtgtgtcgaaatagcgatgtctttcaaatgccagttccacacgacgttctttacgacaaagttcaatcagttcgtccacggaagcattgggatatacacttgtaatcggagtcaatcccgcacggtcgcgcaaatccgcccatttttccattgccagttcttcatatcctgccggcaaagcaacattcctcttcttacattccagaacagattcgatgaagttcagatacatctctccgagacggaataccgggaatgtcagattaccccattgtccatcaccggagttcagtgtatggtcataaaaacgattgcacaggtaaccactcttaggatagtcgtggctcttgttaccattacctcctttggcaaaagagatcattgtgctgccagcaccatgcaaccaatagttacctccaaagaaaacagtgatataaaaacgaggttcacgatctttatacatgttaggagcagtgatattgtagttcttaaagttgctccatccttttgctggatattcccagtctgatttttgcagttcttcttccttgctgtatcctgaagcattgtctattatcggatcacctgatgcttcataccctataataggatagcgtccgttgttcatcgcataagcatctacctgttgctgtgtaggacctacaccaccgtatgcagtaccgggtagtccggtgggagctgtatttactccccaactatatccgctattgtaacggtctgtccagatcaattcactattccagttcacatgggtgataccataataatcttcatacggatcaccgttacctgcacgataaagttcgtaatcagtatcgtctaacaagactttagcagcctttgctgcttccagccatttattggcatcgtatgtttgcgggaaaagatccactcccgaaagttcggggaacttgtctgttaccgggttctttaccgtacgatatagagcattaccgttgaacaagtcgcgtgccgaataaagtttcagacgtgaaatgactgcataacaggtacctttagtcgctaaaccgtatttactggtcgacagacccttctgaacaggtacagcactactttcggcacatgcagtaagttcactgactacataatttacacactcttcccatgtgttacgaggacggtataattcttctgtagaagctgcaaagtccagtaattcgtctccaatcaggaaaataggtccgtagtcgcacatcatactaaaatagtagtaggcacgggcaaagcgcgcctgccaataccattcgtcaagttgttcctgggtagccagagggtctgagcatttatatacattctgcatgaaaatattacattcacggatacctttatagtatttgtccattttgtaataaggtacatttgaggcattccatgatccgaagttcatagaacggtaaccacggtcataagtaatggtacattcgtccgatgctcccaaatagggttcattatctccaatgaatcctccattgtagttaggaagaaatgacatagcattgagccaatactgcttgatcgtatttcttgactcccagattttttcgaaagtcagtttttcgtcttcttgcctgtcaaggaaatcttcacatgaagataacaacatcgcgccggtagcgaagcataacagataaagtgattttatttgaagtttcataagttatacagttataagatttagaaattagcattgaagccgatagtgatcactcgattcaacggatagccggaaccttctcctccacctttttcaggatcccacatatcgaatggagcaaatgtgaacaggttgcttcccgacacataaaagcggaaagacttaatgaatgttttacttgtcaacgatttgggaagtgtataaccaatctccatattcttcaatcgtatgaaagaaccgttgcgttgccaccatgtggaagtttgagtgttgttagatgctccggcacctccgctaccattgctgaggcgcgggtagagtacatttgcattctgttctggggtattagtggacatccatacattgttgtatatattttcgttcacagccgaacgttccaagtttcctgaagagaaaagactcttaactgatgatccgcttaagaagaaacttgtgcgagccgctccttgaaaaaatacattgaaatcccagttcttccattgtgccgtagcaccgaaaccatacatgatttccggtaagttagtatatccgatagcgatttggtcttgagagttgataactccgtcaccattgatatcctgatatttaatatcacctacacggtattctccgaaactttgtacagggctgttgtcaatttcttcctgactttggaataagcctaacgctacgagtccgaaaggctgcatggaaccacctgaaccaaaaggtttgcctattctgttttggtatttatattcccagtctggttcgtcgttgttcttcaatttgttacgattatatgtaaagttacctcttgccgttacataaacattacctatcttctgtgagtattcgatattactatcgaaaccctggttcagtgtttcaccgatattgacataagggatagtggaaataccgacaatggcaggcaatccggcacgttgcaggaagattccggtacgttcttcacggaagtaatcggcctgtactttaaccttgttgaataaagagaattcgataccgacgttcaatttcagagcttcttcccaagatgcgttcaggttttcaacttcaccaatacgaataccgtcacctccttggttggcactttgaccgtattgccagtttcctcctcctacaatagaagattcgtatacccatcttctctgtccgccgatgtcatcattacctactttaccgtaagaagcttttaactttaacatatcaacagtgttagttataggttcaaaccacttctcgttagacatcatccaaccgatagctgctgcagggaaaaaaccaaaacgatgtccgcgtgcaaagttttcggaaccgttataaccgacatttacttcagcaaaatatgtatctttgaatgcataagtaacacgtcctgccaaaccttggtttttataaggaagtgcagcgtctccgctaccggcctgtgtgttagtatgtattttctgattgtatagtaacaatgcgcctacacgatgtttttctgcaaacaaacggttgtagttcaatgagccttccaaataacgtgtcatcgttccgctacgtccgattgcgaatcccaaagactcacttccggtatgtacggggtcccattcaccgtcaccattattatcgtcatatatcagattgccttggtcgtctctcccacgggcatgatagaaagtcggtgttttggagcggcgttgcaaggtagtgttccacgcatcccatgagaatttcaagttggcagttaatccctccaacggtttccaaagtttaccgatatcttgcgtaacaccgacaagtgcttgtgccgagttccagaactgttcacggtatccggagtgaaccagcatattccatgggttgaaaccggaatcggtagaaggtcctgaaagttttccatcagagtattctatcgggaatgcgttaggggaagcattgaacgtatatccccaaatgtcgttatcgttgtcaccaaatccgggaccaaacgatttttcatagatattagccagattgacattcagtactgtgcttttggtcaggttgaggtctatattggcacggaagttgaatttgttgtaattaatagatgaatcgtatccatatatgtttcctgcatttttgtagatagagctttcattatagaaagagcctgaaacataatatttcacgatgtctccaccaccggtgatactcagatttactcgttgattttcagccatgtcgtcgaacaaagcatcaaaccagtctacatccgggtagagatcggggtcactatgttctctatatttctgcatgacttcgtccgaataatacttggttgaagaagcttcattgtaaagttccgcccatcttgctgagtcgagcatcttcggacgtttggtaggactggtaaagccaaactctgtgcgtacattgattgctggcttaccttcttctccctttttagtagtaatcaagattactccgttggcacctcgtacaccataaacggcagaggccgaagcatctttcagaatggagaatgaagcgatatcgtctgtatctaccagatcaagatcacgttcgatgccatctaccagcactaacggagtggaagttcccttaaaggaagatacaccacgaatgtagaaatccgcggcactatttttgccgggctctcccgaacgggtcatagccacaacaccggataactgacctgccaacacatttgaaattgatgctccgggaactttcagtttcttgatgtctagcgttgagatagccccaacaacactttctttcttctggctaccatatccgacaacaacaacttcgtccaatacttcagtatcgggttgaagagtgacattgatactcttttggtctatgattgcaatttcctgcttcttcataccgatataagagaattcaagtactccacctacaccttctatcgtgatagaatatttaccgtctatatcggtcacagcacctaccgaactgttttttagccaaacagaagctccaataataggttcattggtatcgctatcccttactacaccggtaataacacgcttttgctttttctgttgagtcgattcaacaatattagtagtagattctcctttcacatccttccattcctctgctgcagaggaagaaagcggacaaagaagcaatgacagaacagtatacttcaaataccgttgtttacaaaaaaaatgaaattgtctcatgctttttcttttaccttaattccgcaacactattacaaatataactttttaagtacctgagcaacaaaaagttgctcaggaatttgccatgtcagatttttcacctatcttagtgttgcaaatcaaaatatgtatcaaacccgacagacatggcaaaggtagcaattaaatccgagaaactcactccttttggaggaatattttcaataatggagcaatttgactccagactctcatctgtaatcgactcaaccctcggtatgagatgcaggctgtatggttatcaatacagcgaaatcatccgttcgcttatgagcgtttatttttgtggcggctcatgcatcgaggatgtcaccactcatctgatgtaccacctttcgcttcatccgacacttcgcacatgcagtgccgacacgattcttagagccataaaggaactgacccaggataacatttcctacacatccgacactggcaagacctacgacttcaacacggcagacaagctgaatacactgctcctcaattgcctattgtccacagggcagctgaaagagggcgaggggtatgacgttgacttcgaccaccagttcatagaggctgagaagtttgatgcgaagcctacatacaagaagttccttggttatcgccctggcgtggcggttattggcaacttgattgtcggcattgagaacagcgacggcaacacaaatgtccgtttccaccagaaggacacgctgaagaggttctttgaaaggtttgaacaaaacaagcttattatcaaccgtttcagagctgattgcggctcgtgttctgaagagatagtggaagagattgctaaacactgcaagaccttctatatccgtgctaaccgatgcagttcgctctacaatgacatctttgccctcagaggttggaagaaagtggaattgggcggcattgagtttgagctggcctccattctcatcgagaaatggaaagggaaggcataccgtcttgtgattcaaagacagaagcggatagacggcgaactcgaccgtgggaaggagaatacacctaccgctgcatccttacaaatgactacgagtcttccgagaaagagattgtcgaattctataacctccgtggagggaaggaacgcatcttcgatgatatgaataacggattcggctggaacaggcttccaaaatcctttatgggagaaaacacggtgtttcttctgcttatggcactcatacgcaacttctataaattcatcatggcgaggcttgacgtgaagaggttcggactcaaagcaacaagccgcatcaagacgtttgtctttaagttcatctctgtgccagccaaatgggtcaggacatcaaggaagtatgtgctgaatatctattcatgcaacaatgcttatgccaatgtgttccagaatgactttggataacaccgacaacttatagtcgtgattttgcgtattgcctcaagtcgcatggtggggtaaggggcatttatatgtctttatggtgacattcgatgcactgtgccccctttttactaacgatgcagattcttttcgcttctgtatcatattaggcgcgtagttgcggatttgaggttttagatttaacatttggttaattgtagattgagttaaaggttgaatatgttcttgcagaacttattacatgttctaaattaagagttgtttttcacatcatattacattggttaattaggttatatttataataggcaacaaattttatgcgcaaagataactatttatttgaataacacgcaagaatgcatattattttctttatgaattaaaaaaaatatttttgccttgtgtcattcccgaatccccccaataagcattttattgtgattagtatataaaataggtataatatactacatggattattaagataattaattgaatatcaatacttaatgagcttatctcggtagaacaatagtaccataatcttctaccagaccgcttcacaagggtttctcatgcaaccgtgtgctatcggagtcatcctaaaaaacttgataataaggttgtagacatgtaataagttctgcaagaactaaataaactaactacttcttccatatataacaaatacatactaaattactcattccctcatatttacaaactatatgatattcggcaaatgtctctctttgggaataattattgttgagtagagcgcagtttcatattatcttagctcagtattttaaaccatgaatattcctgtatgtatacaggaaaatcatgaaagagggtagtacttcattcctctgtgatttgttcgttaagtattactcatgatgatacggtccgccattcagtatcgtcattgcccgataaatctgctccacgaatattaatcggatcatctgatgcgaaaaagtcattttcgacattgaaattttttcgtttgctgcttgatataccttttctgaaaatccataagggcctccgataatgaaaactagccgcttgttgactgtgttcatttttcgtttcatataatcggcaaattcgagagaacgcatctcttttccatgttcatcaagtaatacgattacgtctcccggttggagtgatttcaatatcagttctccttctttttctttctgcacttccattgaaaggctttttgtgttttttagttcggggattacttccatatcaaaagtaatatagcgtttggtgcgctgaatatagtcattaatggcagttatatagtgttgttctacggttcgtccaacgacgagcaggattgttttcatacgtctgttattctgattaatgcacaaaaataggcattttttatgttattctgcaattaatgattacctttgcctatcattagttgaaagtttaaggctttaaacttcaactttaaagcttgtatttatgaaaaaacgagtgcttgtaggaatgaccgctttgcttctttctatctcgttgcttatggcgcaagagataccggcaggagtgattacggcatttaaaagaggaagttcgcaagagctgagtaagtatatggggggcaaggtaaacttggtgctccagggtcgctcgacaaacgttgacaagcagaaagcaacagctatgatgcaagatttctttacggagaataaagtcagcggatttaacgtaaatcatcagggaaaacgggatgaatcgagtttcattattggtacattggctactaccagaggaaacttccgtgtaaactgcttcctgaagaaagtggagaatcaatatttaatacatcaaataagaattgacaaaatcaatgaataaggaaaaagaactgatcgacaagctgatcgatcttgcttttgcagaagatataggggatggggatcataccaccctttcatgtattcccgctactgctatgggaaaatcaaaattgcttatcaaagaggccggtgtgctggcaggtatagaagtagccaaagaaattttcaatcgtttcgatcctacgatgaaagtcgaggtatttatcaacgatggaacggaagtggaaccgggtgatgtggcaatgttggtagaaggaaaagtgcagtcactacttcagactgaacgcctgatgctgaacgtgatgcaacgtatgagtggtatagcgacaatgacccgcaaatacgctaagaaattggaaggtacccgtactcatgtgttagatacgcgtaagacaactcccggaatgcgtatcctcgaaaaaatggcagtaaagattggcggtggtgtaaatcatcgtatcggacttttcgacatgattctcctgaaagataatcacgtggattttgccggaggtattgataaagctattacccgtgccaaagaatattgtaaagaaaagggcaaagatctgaaaatcgaaattgaagttcggaactttgatgaactgcaacaagttctcgacttgggtggtgtggaccgtattatgtttgataacttcactcctgaaatgacgaaaaaggcagtagagatggtagcaggtaaatatgagaccgaatcttctggcggtattacttttgatactcttcgagactatgccgaatgtggcgtagactttatttcggtaggagctttgactcattcggtgaaagggctggatatgagtttcaaggcatgctgattataagcggtaaacgataaacagtaaacggtgaacgataaacagtcaatggtgaatactttgcagcacggtagtgtatagtgctgttcattgtttaccgtttatcgttcaccttttctttttctccatttattatttatcgtctctttaacttcttttagcaatattcattgcagcattcctcaaattcttgcgtctaatggacaaacgacgcagacatacgttcgatttttaaaaaaggtaattgacttggaaaacgagatagaactgataaagggctgtcgggcaggaaaggattcagcccggaaggaactttacaccctctattccaaacagatgctggcggtatgtttccgctatacgggcgatatggatgcagcgcacgatgtattgcatgatggtttcattaagatttttaccaacttctcgtttcggggcgaatcttcgcttagcacatggattacccgggtaatggtcacccagtcgctcgattatttgcggcgtgagaaacgagtcagtcagttggtggtgcatgaagatgagcttcccgacatacctgatatatcggactcgggaggaggggctggaatctcagaggaacaattaatggcttttattgccgaattaccggatggatgccgaaccgttttcaacctttatgtgtttgaagagaagtcacacaaggagatagccaagatgcttcatattaaagagcactcgtctacttcgcagttacaccgggccaagtatttattagcaaaaagaattaaagagtatagaaatcatgaagaaagaaaatgatgaaataaccgatctgtttcgcactcgtctcgctgatgccgggatgaatgtccgggacggcttctgggaagaactctcacaggagattcctgtggcttgccagcaacgtcgtcggttactactcttccgtgtagcagctgcggcatctgtgttgcttgtcttggcggcttcatcggctaccttcttatatctttctccaaaagaggaaatggaagaagcatttaccaagatagccgtggcgaacggagggcagttggacggagatggaatacgtgtcaatcaactaccgttgccggtagaaccagtgttgccgaaaccggctcctaaatcttatggaatgttgtctcaatacacagaagaagattcgctttccattaccttctctatgtcgttctctttctcggctacgacttccaccggaaatggaaaccgatatggaaaccaaggccataatggctattggcaggcaacgaatggtaatacggaatcatcggattcgcgaaaagaacaatatgaaacgggcgaatcagtagtccggaagatctctacaaagaaaaaccgctgggcgatgaaagcccaagttggtacggcacttccagcagaggatggcgtctataaaatgccggtttctgtaggtgtaaccgtagaacggaaattaaatgattatctgggtattgaaaccggattgctttattcaaatcttcgctcggcagggcagcatttacattatcttggtattcccgtcaaaattaacgtgacattgttggatacaaaaaaagttgacctttacgctacagtaggaggaattatagataaatgcattgccggtgcaccggacaacagtttcaaagaagaacctgtccaattggctgtgaccgctggtattggaattaattataagataaatgatcgcctcgcgctttttgccgaaccgggtgtttctcatcatttcaaaactgattcgaaactagctacggtacgcacgaaacggccgactaattttaatttgctttgcggacttcgcatgacgtattaatccttgaagaaaatgaaaaaaacacttgtaatgctgttggctatttgcctgattgtatcctttactgggtgcggcagcgaagaaatggattataacaatccggatgttaccctttttgtgaagcaattgaagacgggtacgtataagatgaagaatgacaaaggagtggtggaggtccctcattttacggaagaggatattcccgaacttctgaactatgcggaagatctgactattattccttctttcccgtcggtttataatatgaataatggtaaaatccgtttaggtgagtgtatgctttgggtgattgaatctattcgtcaaggtacacctccgtcgttgggttgcaaaatggtgttggctaatgccgagaattatgaagcactctatttcctgacagacgaagaagtacttgatgctgccgcttgctaccgtcgttggtgggaagaaagacaatacccgaagacgcggtggacgattgacccgtgttacgatgaaccgctttgtggtacagggtatcgctggtggtaaaaaagaggagaatcttcgggaaataaaaaaacaataaaaatgaggaaacgtttatttatatcggcagtatcactgctgctgacagtggtatgctatgcccagtggtctgtacaggattcactcaaattgcagaagctattggagagcagtgaggagttgaagctgaatccgaaagcagttaggcagattgatttcggcagtgcggtgggtactccccggatgtcggaggagaaaagctggatgctgcctgacgaatcgcttcccgaagcattgcctaaaccaaaagtagttctttctttgatgccatataaggctaatacccgttttaattgggatccggtttatcaaaaaaagataagggtggataagaatacatggcggggagatcctttctatgagattcgacaccaaagatcgtataccaactgggcacggaatccgatggcaaaaggtatacggaagtctttagaggaaatacaggcgagcggagtacggttccgtcagttaagtgaacgtgccaatgggatgatggtgaattcggtggtgacggatagtcctattcctttgtttggtggtagcggagtgtatatcaatggaggaactattggaggacttgatctgatggctgtctttacaaagaacttctgggataagaaaggaagagatcgtcgtgaacgtacgctggaagttttgagagcttatggggattctaccacggtgttgattaataaacctattgaacagattatccgttgagggtgtttatataaatgtgctaatgtcgcgatacgacaatatactgactagggaacgtttgtaattgaataatttatatatttgtatattgttgtattagcgcattagtaatttagctggttattctagccggtatattagtaaattagcacattgataaattattaattatgaatagaattacttctcttctggggattcaataccctattgttcaaggtggaatggtatggtgcagtggttggaggcttgcttccgcagtgagtaacgctggtggtttgggactgattggtgcaggttctatgcatccggagattttacgcgagcatattcgcaaatgccgtgtagctacagagtttccttttggtgtgaacattcctttgatgtatccgcagatagaagaaatcatgaatattgtggtagaagagggagtgaagattatttttacttctgccgggaatccgaaaacatggacaggatggttgaaagagcgtggaattacggttgttcatatcgtttcttcttcccgttttgctgtgaagtgtgaggaggccggggtagatgcagtggtagcggaaggtttcgaagccggcggacataacgggcgtgaggaaactactactttttgtttgattcctgctgtacgtgaagcaacgactttacctttgattgcagcaggaggtatcgctacgggagaaggaatactggctgctatggtattaggggctgaaggtgttcagataggaactcgttttgcattgactgatgagagttctgcaagtccgctattcaaggaatattgtttgagtctgggtgagggggatactaagttgctgttgaaaaaattagctccgactcgtcttgtgaaaaatagtttccgggaagctgtagagaaggccgaagatagtggagcttccatggaagaattaagagctttattgggacgggggcgtgccaaaaaaggcatctttgaaggagatcttgaagaaggagaactggaaataggacaagtatcgtcgataatttcccgtcagcagcctgtggcggaggtcatgaaagaattagtggaagcttgtcaacgggcagcgaaaaaagattatttgtagtttaatgaggttgtgccggcattttgaagtgcaccccaaaagttagacacaacctcatgttttagaacagaatgtcgtctgcgttgagatgaataagtagtgcatagagtggttgtttatagacattcattgtcctatttttgattttcatgctttttccatagagacccactcgtgttatgttattattaaagggttctgcaagatcatatctgaaaggaagtactttcttgtcttagtcttgattattaatgctgtaattctggattagcatcaatagcagcctgtggaatacgcaatgtatagcgtgcatcgtctttctctaaaatatacgttttaccatcgataactttttcgatgcgtgggcgggtagtgcgtcgtaaatcaaaccaacgatgaccttcgaaagcgagttctttagtacgttcttcttgaatttcagcaagaagcgcttcttgggacattacttctatttcattttttttcagtgtataaccttccggggtatatcggttttctataagctttaataatcgaccacgagcctccgagagcttatttaagtgagcagcggcttctgctgcattcagataaatttctcccgtgcggaaagaacatgagaattgcgtagaaccgcattttagaacaggaaaattaccatttttgtctgctacgtcaaagtatttgttagggcgtaaatcatttctgtcatatttttctttcagcataggtgtggctctaaatgctttatcgacatctttacatacatattcataggctgtgatgacctctgttgattgaaaatcattgggaattttagaattctctttattaaaatcttctaatgatgatttttgtgataagaccttttctgcactattataagtttcttgccattttcccatatataaatatacgcgtgattccatagcatctaccgatatagttgaaaaacgatatgagtattgtttctcccactctttgcaatggatcaatttacgagctgattcaatatcatttaaaatcgctgtatatacttcactaacagtattacgggacggagttttttccaaatcaatatctaactttattggaattgctttagtttccggagctccatcttttgtatatggttgtccgtaaagattcactaatagaaaatgcatatatcctctaagtagatatgcttctcctacaagttgatcgatgtcttcctgagttccttctgttattttatctctattatctattatggcgttggcataatagataatgctataataattgctccaagcaaattcacgtgtaccgggaataggattagagtcgttccatttctcaatttccgaataatagttttgatcatattcattatctctgattgtcacctcatcggtacgaaattcagtaactcctctgtcgaagagaggctgggaatatgcttctgttagcaatgcccgatattctgatagagtatttggaattacttttcctataggttggatatctaaaaaactgtcacaggaagttattaataggcttcccaataatgcaaaagtaatatataatttcttagtcatgcttattcttttttagaagtttaggcttaaattgaatgtcactgattttgcaatgggagttgcatacagatttcccattgattcagggtccagataattcttgtagctggaaccgaatacaaataagttacgtgcctctacagcgacggttgctccgttgatgtttattctgtttagtaactttgaaggaatctggtaagctaaacgtatattttgcaaacgtatataatttaactttttgacccaaatatctaaggagttgtaaatacgtggttgatcaaacaacaaactatattctgcaggattagaagcagctgtcaatatggcggggaattttccatttttgttttcaggagtccatctatccagaatatcccgattggtattgcggctcgcatcaaattttgtcagactgtaagaaggtgttgtttttacataagccccaaaattataggagaagttcaagttcaattcccaactcttataattaaaggtattcataaatcctccggtatatggagcgtcggatgttcctatatagctatagaattctctttcttcaagagttgatacttgaggagtatagattccgattccccattcgtctattgctactttatataaatcttcaagaaacatgctttttccgttctttgcctttacgcgaatacgtccggtttcagaatcaatgccatcagtcttcaaagcaaaaatagctccgacaggataaccttcaagactgggagtttcttgtgaatccggagtattaattttcagtactttattttggttatatgcaaaattgaatgttgtgtaccatgaaaattttttggtggtaatattgcgtgtttgcagatttatttctactcctttattctccatgctggcccaattaatcgtcattgtttcaaatccgttttctaacggcagaagttttttcccaatcaggtccgttccttttctatagtaatagtctacacttaaattgattgcctggtttaatacggagaaatctaatccaaggttatatgaagcagttttttcccaacgtaatttgctgttgggagcaccttctatttggatagtttgttcttcgtcatatccgggtaagagtcctacattgtcataggatcctactaggaatggtgaagtagttttatcgatatttccttgcagaccgtaagaaagacgaattgccaggttatcaatccatttgtatcgttgtataaaaggttcattggaggcgcgccacataccactaattgaataaattggtaaatagcgatatttcttatctactccgaaaaggtcagagccatccatacgtacacttccccctatcgtatagcggctcatgaatgaatatgaacctgtagtatagaaggacgcaaaagcattttcttgataagttttagtatgtagtttatatttctctgcatccttgtcatttctgatattcagtggctttgttgtcaatgttttgggatcataaccatatccggctgtaaattgagtgttataccagttctttcttatttcagaacctgccattatttgaatatcatggatatcattgaatgtatttttgtattctccttgtactttccatgtaatttgagaagtcgtagcattatttacagtatgcattcctcctttgggaacaatgtattgattttcgtcatagctactatcttcgcgtatgttacgcatattgaatgtattttctcctacatattgttcctgagaagattgatcccattgaataccaacttgagaactgagtttccattgatcgttaaaacgtagttctgtgtcgaagattgaattgaatgaagaaatgattgtttcattatctgtattttctcgttcttcaaagatattaaatccacgttttaagtcaggttcatctccagggaggatatcataatcatattggtagttgtgctctgcatcatacggataaaaatagggattggccgtacgagagtagaatacaggattggaataaccatacttatcagatacaaagttttgattctttcgtctgttggcgaaaatagagacaccaatttttaatattttgttgatttgataagaagtcttacttgtcagattgaaacgtgtcatactaactcccggtacattaccattttctttggagtagcctaatgagttgtaatacgttgttttctctgtgcctcctgaaatacttatattgtattcttgtgtgaaagcatctctaaataatatatcattccaatcagtctgcatcgtttttaattgattgatagcattctgagcttcgggggataatccctcccaaccattttgcagatattgattcattaaattgtatttattcaaaatggttgcaacgccacctttgttgggatatatgctttgattgttttttaataattgtagttctgtatctactttttcttgtgaatttaacaaattcagacgggaagtgtctagattaggagtataagttaatttcgtgttgaaattaatgattggttttcctgttcttccacgtttggttgtaactacgatgacaccattagcagcacgtgcaccataaattgcagtagcggcagcgtctttcaagatagtgatactttctatgtcatttggacttaatcctgcaatagatgattgttgcatattgacgatatcattatctgttgcatcatctaatttaggaatatctgttccttctaagggcataccgtctaatacccataacgggtcctgggttccatttaaagaagccgttccccgaatacggatacgtgccggagctcctggtgcacctgaagttgttgtgacggctacgccggcgatttgtccggttagtgcttggtcgatacttttattcgctccgatcatggcatcagataattctacctttgcaatagctgccgttaattttcgacgttctaatgtctggtatcccgttactaccacatccgccagagcatgtgccgaaggttgtagtacaatacggtagttttttttatttccttgcaatataatcgcttgttcttcgaacccaatatagctgcaatgaatacgagtcactttttccggaacggaaatagaaaacttaccgtcaatatcagtgatagtacccaaagaggtttgtgatactccggcttttttcagatcatcggcgtgaacatatacagaagcaccaattagaggttcattgtcttcaccagaaatgacaacaccagttatcgtgtggttggtagcactggcaaaaaccagtgcattcacaaataagcatataataatgcacaaaaatttgattctcattaattgtaagatagtttaattaacaggtttgttttacttgattcccaaagcggtattaatacgtaaaatcatatcttcataatgataacgtgtagcggtatcggaagtccccagacgattttgcaataacttcttgatacgcaataattcaccacgttttacagaaatggcatctgaaatgcggttaagttgacttccgtaaaaattgagtacacgtggagcacccatgcggtcttcttgacgaagtgcacgttgttcggcagcatagcagctacagaaaggagtggtatggtcaagcaaaaaatgttcgttggcgatcttcttgttgatttttacagcttcgggctctgcggcagcggtaagtaatgcatccagacagtttttctgcaaagagcgttccataacgttagggatacctccgcgttcagtaataccgaaaatatttttgtggagtccgtccattagttcaactaccgtgaatgctttcttaccgttgacggattcattctcaatcatacgcattaggcgggtattgcctagtaaatcccaaagaatataggcttgtgcattcttaaggatttgagtgggtgcattttcttgctttccgatcggagtgttgcggagcagataagtatattgcccgacttccgtatcaaataaccatttaggatatgtcaggacttcatccattaggaatttcagggctgcctgttgcttttctttttcaacaaatgtgtaggttttcactccgtcgcctactatggtgttttcaatataaataccgccgatattggcaagtacatgatatagataattgttccattggttgatgacggcatagtagaggcgtgacgcttcttcataagtctgtcccttttctccggtagtagtccactgaagaatttgcggaacgatacgtttcaagttagcaatgccaagttgtgacgaacgaaccgggtcgtctcccaaatcttcgttctgggcacgcgggtctacggcgtcacgtacatcttgtgcctcactatatttgtaaagacggtctgtatgtttactcaagaaatcgaaaagaatatccttttcttcttccggagtattcttgccataccagcgatatccatattcgatagcaaacatatcataaggaccgatatgcggggacagtacttttacaccgtctcccggttgggcgatataattgaaacgcgcataatccataatagacgaagcagtcgaattcattcgggaagtgaatgccgcagaacgcaatgagtctgttgggaatgcccatgaacccatcatgttgtgacgtaatcctagtgagtgacctacctcatggcaagcaacaaaacgaatggcatcccccattaacgaatcaggtaattgtacgctgcgagcttccggacaaacagttcctgtctgaacagtaatccattcacgtaccatagaaagtacattgtgccaccacatgatatctgcttccagaatttctcccgaacgagggtcgagtagggaaggtcccattgcgtttttcttttctgatgcagcataagtcagtaccgagtaattgacgtcatccatgtctacatgcatactgtctgtgatttctttagcgataattgcatttttgaaaccggctttttcgaaagcagtctgccagtcttctattcctttctttatgtatgaccgccattgataaggagtcgaattatcgatgtagaacacaattggcttaataggttctactgtctgaccttttagatatgcttcccggtcttctggtttgggttccatacgccaacgggtaatatattgtttcttatccgttccttgttgtgcgtcactgaaacttaataacggattggtgaagtagccgactttctgattgtcgaaacgtcctgtcatcggtttttccggtaataaaagaatagaggaactaacttccaccgtcacatatacgcttgtcgttccttctgtcactttagtggtcagctcagaagttgctacaacgttgttagggaaagatttgatcgacaaaatacgtgataagttcttgatagcggaagtccctaaattaatgtttgtaaaaacattattgatactggtttccgtaccatcgtaaatatcattcactttgatcaccaatgcagtggagtcctgattgatagcttctattttgaaagcggcaatcagtggcgagataaaattgtcctttaccgaacggaagatagcgtccgtttgaggagccagtggtaatgggcgttgttggcgaaacatcagtttgccggttgccttgtcccattccatactaaccatttggttctcgtagttcactccgcggttcactcctgcgtcattcagttcggcaggtacccgttgcagtttattgacaattaataaatcacgccctaaaagtgatgtaggaatttcaaaataataatcgttctttttttgatgaacagcaaacattcctttggtaattttgctaccttccacaagcttttcgtagtcgcttttggttttctcctcttgctctggtttcttctttctctttttaaaccaactctgattttctgtagcagggatagttgcagatgttgagtgtgtttctccactcatcaatatacatgcaatgaccgctgccattacctttacatacattctcattgagtccttttatgtttaattattattaaaatcgggcacaaaagtactaatataaataacataattgctacagatttgcaatgaatataataataaaaaggattattaactagtatttccgcttatcattcctttcggatatttcgtagtttagtgggaatagtgtacatttgcgggagtaaaaagtgaatggaatgatgagacgatatatcaccactttgatgttggcttgctgcatcggaggatatgggcaagaaaagaagcaagccacctttgtaccaccttttgactttcctcttacattgagcggaaacttcggagaaatccgttctaatcactttcacggcggattggattttaaaacgggaggagtaatcggtaaacctgttcgtgcattggcagaaggctatatttcacgtatccgtgtgacgaatggttcgggctatgtacttgatgtctgctatcataacggttattctactatcaatcgtcatttgagcggttttatttcccctattgccgaaagggtggaaaaactgcaatatgaaaatgaaaactgggaagtagagattatccccgaaccggatgagtatccagtaaaagcgggacaacaaatagcatggagtgggaataccggctattcattcggaccgcatcttcatttggatgtttttgaaacggagacgggagattatgtagatcccatgccttttttcaaaacgaaaataaaagatacgcgtgctccgaaagcggacggcataatgttttttcctcaacttggtaaaggagtagtggatggtaagcaagaaaataaaatgattcttccgaacaccggacgtccggtggaagcatggggtgtgataggtacaggcatcaaggcgtatgactatatggatggagtgagcaatcattacggagtgtattctgtagtgcttacagtagatgagaaagaagtattccgcagtactgtcgatcgtttctcacaagaagaaaaccggatgattaactcttggacttgcgggcaatatatgaaatccttcatcgagccgggaaatacattacgtttattaaaggcatcgaacactaatcgtggtttggtgactattgatgaagaacgcgattatcgcttcttgtatactctgaaggacgtttttggcaatacttctaaatatagtttcacggttagggggcgaaaacaaccgcttgagccattgcaacatcgcgaaaagtatttctttgcgtgggataaggtaaactatctgcaagagccgggtttgaatctggttgttcccaaaggaatgttatatgacgatgccccccttaattatcaagtaaaagctgatagcggtgctattgcgtttacatatcagttaaatgacaaaccgattccgcttcatgcaagctgtgaattgcgtattggcttacgtagaaagccaataactgatactacaaaatattatgtagtccgtgtcaccccgagaggaggaaaatatagtgtcggtggaaagtatgaagacggatacatgaaggcatctattcgtgaattgggaacttatacggttgccattgacacaattccgcctgaaattattcctgttaataagaagcaatggggaagaaccggaaagattatctatcgtttgaaggacaaaggaacgggtattgcatcctaccgtggaacgattgacggcgaatatgcacttttcggacgaccgaatattgtgaaatcgtattgggaatgtgtacttgatccgaagcgtgtgaagaaaggtggaaaacatatcgttgaatttacggtaactgattattgcggaaatgaaaccgtatcccgtgaaagttttatctggtaaattattaaaagaaaatcatatatgaagaaaagacttattttttgtgctgttctattcctggcggcagtggcggatactttcgcctgtactaatttaattgtcggcaagaatgcatcgactgatggttcaactatcgtttcctattctgccgactcgtatggcctgtttggagaactttatcactatcctgctgctacatatcctaaaggaaccatgttgaaagtgtacgaatgggataccggtaaatatttgggagaaatcgaacaggcacgccagacttacaatgtagtgggtaatatgaatgaatatcaagttactattggtgagacaacttttggcggacgccctgaattggctgattctacaggaattatcgactatggaagtctgatttatattggtctgcaacgttcgcgtacagctcgcgaagcgattaaggtgatgactgatttggtacagcaatacggttattacagtgaaggggaatcttttaccattgccgacccgaatgaaatttggattatggaaatgattggtaaaggtcccggtattcgtggagcagtatgggtagctgtacgtgtgccggatgactgtatctcggctcacgccaaccaatcacgcattcatcagttcgatatgaacgacaaggagaattgtatatactcgccggatgtcgtatcttttgcccgtgagaaaggctatttcagtggtgtgaataaggatttcagctttgccaatgcgtatgcaccgttggatttcggagcccgtcgtttctgtgaagctcgtgtgtggagctatttcaataaatttacagataacggtaaagattatcttccttatatagaaggaaagactaataccccaatgcctctttttgtgaagccgaagcataagctttccgtgcaggatgtaaaagacatgatgcgtgaccattatgaaggtacgcctctcgatatttccaatgatttcggggcaggtctttacaagactccctatcgtctttctcctctgaatttcaaagtaggcgaccgggaatatttcaacgaacgtccgatttccactcaacaaagcggctttgtatttgtggcgcagatgcgtgccaataaatccgatccgataggtggtgtgctttggtttggagtagatgatgcgaatatggcggtgttcacacctgtttattgctgtgcaactaaagctccggtatgttacacacgtgtggacggagctgattatatcactttctcatggaattcggctttctggattttcaattgggtgtctaatatggtttatccccgttacagtttgatgattgatgatgtacgtgcaactcaaaaagaactggaaacgactttcaataatgctcaggagggcatagaagaaatggctgccagacttttggctaaagataagtctgctgcagttgaatttttgacgaattataccaatatgacggctcagagtactttcgatacttggaaacaattaggcacattcctgattgtgaagtataacgacggagtagtgaaacgagtaaaggacggtaagtttgaacgtaattctatcggacagcctgccggtgttattcgtccggggtatccgaaagaatttctggaagaatatgtgaagcagacaggaaaaagatatgaagtgccggaataatagttgttttagttgttattaaatcatatataatgtccacatcatttctgctttgcgggtgatgtggatttttattatgttgataatcagtaatgtatttgccatgtatttgtccattccaaatatttggattcttttctgctgctgcctatctttgccttattctatttcaaacaccaactactatgcgaatcatctttattatatattacttgcttatcacattactctttgtttcttgccaagagtcatcatctgttgaagtagagagggaaaagatagcctctctgttacagaagggtgacagttgccgtcaggttggtaatgaggaaaattcaatagccttctattatcgttcgttggaattagctaagcaaacgggagaacaattgttggaagcagctactagtgatcgtctcggaattgtttatttatatcgtgaactttattatgatgcactcgatttatttcggcaaagtgcgtcgatttatgcattgacgggagaaaatatccggttggcattggcattgcgtaatatagggcgtacgaacttggtgttgcatcattccgatagcatagcctgttattatgagcaggctattgaggtggcttcccgcttggaagataagaagttactgcatactatatccaaagaactggaagctatctattcaaaggcgggattttacgattattcacctcgtctgatgttgaagtgtttggatagcgtatctgatgacgatttttccaatttgcttgcaggggagtactatatcggtatgaataatgccgaagaagcgagaatttggttgaagaaagctgttcagacgagcgatatgtatatatgttcgagtgcatatcagcttttatatgaaattgagaagagaaccaatcatccggacactgccgttaagtatgccgaatattatatccagtgtaaagattcgcttgataaacagatttcggtttcttcgacgattcgtgctttaggacagaattatgaaaaagaacgtcttaaatgggagaatcagcaattgcagaatgagcaacttcgaaagcgtatgtattatttgatcattctgtcaatttcatgttgcttgctggtagtagggttggttttgtattatcgggagaagtggaagaaagagaaggtattggctggtgttatgaaacgtttacgtgacaatgagcgtcaaatagagaattacacagctgtaatagaaaagaataggcgtattatcagtgatttgaaaggaactcagcagaagaatgcgttactgttacgtgaagaaaagaacaaatctataaattatgagaatctgcaacatgagaatttgttgttgatgaaacaactgcatatattgcattccgatagggaaggattgttacagcaacttcaaatgggaaccaactcatctatttcttcacaacggattaccgctttcacacaactttggctattgaaaagtgaaccttattatggaatcatagagacacaagaagaatggaaccgattgtttgaactcattgacctgttttatgggaatatttccgccagactgaatggttgtgagttattgagagagcatgacagaagaatctgttatttgcttcatgccgggcttgacaattcagctttagggatattattcaatatagataatacttctgtgactaaatccaagcaacgtataaagaaaaaactgggattgggccctaacgatgtgctggaaacatttcttaatgagaataaaaaatagtatatagattgtttcactttaaatataaaacagccatgaaaagactattatttacctttttagctttatgccttgccgttgccggttcggctcagtcggggcagatgacttccaaactgccgactattgatatcactaaggaatatccgaaaaagaaattagtattgcaagatattgcaactgctgaatacattccgctggaaacatcggataaagtgttgctggacggagtggctactctgcattgttcatttaccgaacactatataacaacgtataatgccaatgaagggcaaatcttcgtattcgacagaaaagggaaaatatgccatacatttaatcataaaggagggagtggggaagaatacaactatcctttgcagttacgcttggacgaaaaggctaaagagttgtttctgcttgacatatctaataaaatacaggtctattcgatagagggaaaatacaagcgttctttgtctatccccaaagatgtacggattgaaattatgtacaattgtgatgagcaacatttgttgggttacgatagttatatgttggatagaaaagataaacagcccaatagtcgtccctatttactgatttcgaaaaagaacggagttgtttcccgccttccggtaactatccacaaacgtgtgggaaaacgcatttatattactcaagggggacagacggctaccgtttcaatgtctctctatccgttagcaaatagtggttcggagtttatctttgcagatttggcaggtgatactgtttattcttattgtaatcataagttgaccccgttgtttgtacgtactccgaaagcagatgcttccgagccaagactcgttatgcaatgttatgccaagattgggagctatctgttaatgtcgactgcattgaaaaaatatgaaccggggaaaacttcgtttgatactaaagaatttgtctatgatacggttgagaagaaagtatatgatttggaatttgagaatcaagactattcgcccgcccgttcaatgcgaatgggaggcgtattatcggcattacctgaaaaatgtgttttcgattcgtgggatactgaccgtttattggatatgttggagaaaggaaagttgacgggaaacttgaagaaggtggcggagaagatgacagttgatgataatcctttactcatattgtacaaattcaaatgaaacgtagatgaagattatatggttctttttctccttgtgtctgctggtaggatgtaaacgttcggatgtggcggtatcggtggaacaaacgttgccggtgatagatttgaatgctgcttatcctgaaaagaaactggatttggcagaggtggtgagtcctgaatatattcctttgtatacagtcggggcggattcattagatagatatagtctgacttcagcgagtgtttcgccccattgggtagtagcttataattggcagcagacaattatggtttttgaacgggcaaccggaaaacttcgttatcgttttaatcatcagggacagcaaaaagaacaatattattatatattctcggtgtttgtagatgaagaacgtgaagaaatatatgtagtcggttcagttttcaaaatccaggtttatagcctgtccggcaactataagcgtacgttgaatcttccctatgatatgtctttcgaacaggtatttgattatgataaagattcattgatatttaacgacggaagggaagatgtagataatcctgtccaaaaagggacttattattatttaatgtcgaaaactgacggaggaatgcgtcctttgccttttcatgtaaagtatcgtattacgaaccgctttcgcatccgactaaggaatggagacaggcaaggggtaatttcctgtatgttttccgtaaagccattgttgaagaatggtgatgaagtgatattatccgaattttccaatgacaccgttttctcttatgggaaagaaggagcgaaacctttgttggtacgtactccggctccccgttctacttttcctttgaagttaatgtcagtttcagcttgtagcaggcgttttctgtttttggatgtgatagagaaagtgtatagacggaatatcaagaagttggacggagactcgtttgtctacgattaccgcgaaaaggagatctttactccggtgttggtcaatagtgattttatccctgaactgccggttgagatagataatatgaacggaagttttccgaaatatgccggtgcgtcttctattcattcccgggagtttatgcagtactatcggagaggaaatttacaggggcgggcatgtgaagcggcctcttgcttgacaagagatgatatttatgttttagtgctgtatcattttaactgaatagagccggtaaatgtattcttacggttattattttgaggaaaaatgtaggatttataaacttattattttacatttgtgtgctcaagaaatagatagtaataattcattaaccaataaacaataatcgaaatggaaaatcaggaacttattaaacaggtcactgaaaaagccgaaaaatggttgaccccggcatacgatgctgaaactcaggctgaagtgaagcgaatgttggaaaacgatgataaaaccgaattaatagaagcattctacaaagacctcgaatttggtaccggtggtttacgcggtatcatgggcgtaggtagcaaccgtatgaacatctatacggtaggtgccgctacacaaggtctttctaattatttgaagaagaattttaaagatctgccgcagatttctgttgtggttggtcatgactgccgtaacaacagccgtttgtttgcggagacctctgccaatattttctctgccaacggtatcaaagtatatctgttcgacgatatgcgtcctactcccgaaatgtcttttgctatccgtcacctcggttgccagagcggtatcatcctgactgcttctcacaacccgaaggaatataatggttacaaagcatactgggatgacggtgcgcaagtactggctccgcacgataaaggtatcatcgacgaagtaaacgctattgcctctgctgctgatatcaaattccaaggcaatccggatttgattcagattatcggtgaagatatagacaaagtttatctggacatggtgaagacagtttctattgatccggaagcaatcgcccgccacaaagacatgaagattgtttatactccgattcacggtacaggtatgatgttgattccgcgtgctttgaagatgtggggatttgaaaatgtgtttactgttcccgaacagatgattaaggacggtaacttcccgactgtcatctctccgaacccggaaaatgccgaagctctttctatggctgtgaatctggctaaagaaattgatgcagacctcgttatggcttccgacccggatgcagaccgtgtaggtatcgcttgtaaggatgataaaggtgaatgggtgctgattaacggtaatcagacttgtatgatgtatctttactatattctcactcaatacaaacaactaggtaagattaaaggtaatgagttctgtgtgaagacaatcgtaactacggaacttatcaagaagattgctgataagaataacattgaaatgctcgactgctacaccggattcaaatggattgcacgtgaaatccgtctgcgtgaaggtaagaagaaatacattggaggcggtgaagagagctatggtttccttgccgaagacttcgttcgtgacaaagacgcggtatcagcctgctgcttgattgcagaagttgctgcatgggcaaaagataacggtaagtcattgtatcaattgttgctggatatctacgtagaatacggattctctaaagaatttactgtgaatgtagtgaaaccgggcaagagtggtgctgaagaaatcaaagctatgatggaaaacttccgtgctaatcctccgaaagaattgggtggttcgaaagtgattctgagtaaagactataagactttgaaacaaacagacgataaaggtaatgtaactgctattgatatgccggaaccgtctaatgtcctgcaatatttcacagaagacggcagcaaagtttctgttcgtccttcaggtacagaaccgaagatcaaattctatatggaagtacaaggtgaaatgggttgccgtaactgttatgcttctgccgagtctgctgcaatggaaaagattgaagcagtgaagaagtcattgggtatctgatcctatttcttctgatagttcagaataaataataaatagcgcctccatagtcttttcgaagattgtggaggcgcttctttatatctgtcctgcatctgtttcccactattcaagccggtttagtacagttctttcatttcctttgcattctttaagtcccctttctaatcattcttccgggaatcttgttgtattggcatcatctcaatttaagcacgcaggctacggatatacacacttttgttgatgctttagagtgatacgctaagtttcattttcgtaagttgttcgtttgtagtttgtgtgtatttcgtggcctgctttttggttttattcttttctaacggttactttttttatttgctccctatccaagtccatttatgccatatcgtctccaatggtccctgtttatgtccggacagccaccatttacagaactgaacctgtaagatacaaagaacaatacctataatcaagcttagagtatatccgcagtaaggagccagataaaatccgaatgggaaatagataatggcacccagaacagattgggaaatatagtttgtcaggctcatcttgccgtaaaagcggaggctggaaacagctttttgaaacttagctttctgatacagtaggatgaaggaggaaatcaatacgatagtgaacgcgaatttctgccacatatcaaaagcggtacccactgtctgttgaatcagactgttgtcactctgcatgatttgctctttcaaagagtaaagaggtgcgaagctgatagcagcaatgatgagcgcttttacccaaaatttcaaatgagattcggtggtgacgaataactgtttgcgtccgatgtacaagccgaataggaaaagtccggcagtttgtaagaaacgtccggcgccgatagcccaaaacaaactggctttctgtcccaaggtgacattacctatcaggaattcccagaagtttccacctttggtataagctgctacttcagcatacatcgctccgacatttaagtcgggcagggtataggcaggattgaaaaggctcataatgtagtggaaccattcaatcggttgtagtgagaagaagatagcagtgattaaaatagctttgtcactccatttgcgtacgataaacagtacgatgccgaccacaacgaacagaagcaacacatctcctgccggaaaaaaggcagcattgagagtagcaaagcctgcaagcaataccattctccataagaaacggtagccgaagtcttttcctttcaactgctggttgtgcgattggatatagaaagtgaatccgaaaagcagggcgaagattgcataagattttcctgcaaacaatgagaatgttgcattaaatactccggcatctaaaatggtaagccattcgggagaactttccggatagacggggaaaatgaaatgctccaggttatgtaccaggaggatagccattacggcaaaacctctgagagcgtctactacttcaattcgtggtgtttttgttgataattccatggggttgatttatgattgtttttttagtgaatattcgttttacccatttgttggcaggcttttcaaaataataaaaagaaagcaggctgagtataatggtgatgcagagaatgacggggacacttattgtccattgtatctgccaatgatagtgggcggacattcgcatatatgcatctatgataaacaaatgtatcaagtagaaactataactgatttctccgcctatgattaagaaccggttggatagcaatcgggatatgcctccctgttgtaaggcgaatataagaatgattagcgagacgggtaaccagtaataacaagaatagcgatagactttaggaatgtctgcggcgcagaggaagaacagtaaaaataaggcaacggctcctgcctctaataaagttccggtggaataagaaagttttttattacataatgaccggtagaactggtaaagcaggacacctacgaaaaagtcaggcaggcgggtgaatggatttacataccagtatgctttgatttgctcctcgttggtcagatacatgcctgccagcataattggaagacagatgagcagtgtgataaacaggcttcttttggtatgcaagaaaggaacaatcagaggaaagcagaaataaaacaactgttcgcatcccaaactccacgaaggactgttgaatgaaaagaagtagtcggcagaggggaagaacggttgtaggagaaaggtggaggcggcaaagtgttttatccagtctgccgtgccgctatattgaacgtatcctcctatgcatacggcaattaataatgtcagtaaatgcaagggataaatgcgggcgaggcgcgctacccaaaatgttcgtttggtagcggtcttttccaataacttctcctgatagttgtaagcaataataaaaccgctgagcacaaaaaagaaactgactccgacaaacccttctttaaagaaatgagcatcgaaacttgaatcaatgacgtagcagtgcgccccaaataccattagggcaaagaatatccgtaaagaagttaatgtgttaatcacgatacttatcagtttttttgtattcgactgcaaaagtagtgttttcttatgagataaaaattcacatagattaaaaaagaacttaggattcggaacgcagacggctaagatgttggggagtcatgccaagaaaggaagctatataccccagttgggcacggtgaatgacatcgggttgttcacgtaagagttgttcgtaacgttccttagccggaagatagagccggttgatatggtgcatatccatatatagcaggcattcctgatgaataacccgtccccagttggcaatctcgatgttggtttcataaatccgattcaagtcttcgatacgtatggcatataattcgcagtcctccaacaattctacatattcgtatcccggttcgtcgtgatacaagtctttcatggcaaaagtgatatcaccttcgcgtgaaaaccatatcgtgatttcttcgccgtcgtgtaaacaataagaccggcaaaatcctttttcgataaagtagacgtgacggtctgctacaccaccgcgtatcagtaagtgttttttaggaagttccagcttttccatgtgactgaaaagaacctccagagaactgtccgataccggataatattgccggatacctttgatgatgttttccatagccgattatttgtgagagcattccagccaccagtcgatcatctttcgtgcgaggctcagctttcggggaagttccggcaagttgtcccgtgtgtagaagtctccggaactcagttcttcctcctgcaacctgatttcccctccggcataatctgcaatgaacccaaccattaatccgctgggataaggccatgcttgattgccgaaataggtgatgttcgtcacatccagtcccgtttcctctttcacttcacgcgctacgcactcctctaatgtctcgcccgtctccaggaatccggctacgaggctgttgaacgttcccttgaagttacgggcatggaccaggagcaatgaatcttcttttcttactaagacgagaattgcagtagaaatagaaggatatacttcccgtccgcatttcgggcaacgtttcatgatgtcctctttctgttccataggagtgccgcaggcagaacagaaacgactgttccggtcccagtgcagaatctcatgcgcttttcctgctgcctgatagtgagatagcgggagataatcataagaggcacgaagtccggtcattacatactgtgccgattcttcaaaaggcgaggagagggagaaagacttacaagtctttccctctaatgttgtgatagtatgtaccgtcgttttttctttaatagtgataggcggaatttctccataaggaagagcaaatgtgccgttctctttcttctcaagtaatagctggtctttataaaagacgaaccaccatgattgcgttgttttattcattttaatcttcttcttttgcttcgcgctgcgaaggtataaaaaactgtattgatatttaatactttgtctgataaaatgtcaatggattaacttaatacaatacgctgttcgataccgatttctcgaatgaaataattatcgtgcgaaatggctatgacggtacctgtatagtttctgatagtcgcagtgatgatgtcgatactctgtatatccagattgttggtcggctcgtccaaaataaacatatccggtgtgttgttgctgatcatcaggcagcagaaagcgagccgcatcttctcgccgccgcttaatttccggcaggacttgtcccattcggaagcgggaaacaagtaacggttcaggatgatctttatttcatgttccggcagattgcggttgttgaaagcgtaaacctgttcaaggacactgttccggtcgtcgatgatagaatactcctgattcagataaacataagaaaaatctgcccgtgtgagtgttcctgtctgtggctgaagttgtccggtgatgattttcaagagagtagtctttccgctgccgttggtcccttctatgcggaggcggtcgccactctttaactgaaaactgacgggagtttgccaaagcagttgttccggcaggttattttcggaaggttcgttatcgctttggctatcgctgtcgttcggagcagaatgataaccgaagttgatatcctttgccgtaattaacgtttttccggtgtgcagggaagaaccgttgaaatctgttttaagcgcagccgttggagagagagaaccccggagttggttacgttcttctgtcagtttgtcggctttctcctgatgcacgctgttaagtttgccggtacttttttctgattttccctgcaatgcatttagtacaatgcgcggaacacctcttttaatattagctttctcaccgcgtacattctgtttgtctcttcgttcggctgtttcacgggctaccttgcgtgctatccgcagtgctttttctttttcttcgatacgctgttgtaaggcttcctgcatcagagttttctgttctttgtagaattcgtagtttccgccataataagtgagttgatgtttctccaattcacatatttcgggaagaagattgagcagggtacggtcatggctcacgaccaacaacgtagagtgacatttctctacccagtcatacaaacgttgtcggcccgacgaatcaagatgattggtcggttcgtccatgagtatgacagagggattatgaatatccatacctgccagaaaaacacgggtcttttctccgccgctaagcaaatgcattgggtaggacaggggaaactgccctaatccccatgagtcaagagcggcaatggaacgttcttcgatattccaatcatcgtccaactggttaaaattctccgttgaggcatctcctgccaggatagcttgcagggcttgttgcttgcggtctatccgcaaggcttgggcaatggtcagcgaatcatattgtccgaaatgttgggggatgtaataaatgtcgtccgggcggacaataacgccggaagacggcgatagttgtccggcaataatttgcagcagggtagatttcccgcagccgttattaccgactaatcccagtttctgtcctttactaatggcaaagttgaggtcactgaataatacttctttatccgggtggatatagctgatttgttgaatacttataggcatggttgtctattggggttgaagtgaaagaaatagtgaaagataatcacggggcagggggcgacaaacacaataccggctaaacaacacggattccgtgatgcttaacaacgaggaaaaagcatataagaaaagtgatgtttacttagaagtgttgtcttacttggaaattctcattgcggtaagtatatagtttaacttgggcgcaaagatagcacttttggggaagaatcctattctatttcagtagaaaagttatttcagaggctccatttactcaattcagaccttctgttctgctgaatcagaacctttgtctgccctgtttagaggctctgtttcggtagtccggaacgtgaatggagaagtttttttgagttaacgacaaagttctgagcattagggactaaagtttctttctattggtggtaatctataaacgcaacttgtatttataaaaatgaagctttcatttataaaaacgcaggttgcatttataaaaacaaaagcttcgtttatagtttattgttagggtctgacaagtttagtattcgtccgggataagtttatgagtaggcaagaggaagtttattgctaatcaactggtttatagtctatatcttcctttatttctttaccattctatttcttatatatcgaacaactcattcaagccttcactcatactaggatgcgtaaagatgaaatcccgcaggaatgtataatgttgtcctgttttcatcgccatggcaacgatattgattatttccggggcttcggcgcaaaacagtgtacaccccatgatctttccgctatggtcgtttacaattgctttcagcatgccgtctgtctgtttcaacgtgcgcgaacgtaccacagaagtagccggcaaacgggaaaccttaaaagaatatcctcttttcagtgcttcttcttcggtaagtccgatatgagccaacggcgggtcgataaatacggcataaggaacagggtcacgatctccgatgtcccgtttcttgtctccgaaaagctggtcgcggatgatccggaaatcatctaatgagagataggtaaactgcggtccgcctttcacatcacccattgcccaaacgtgagggacggttgtgcgtaactggtcattcaccacgatagccccgtgagcatccacccctatacctgctgcttgcaggttcaacccttcaatcataggctttcgcccggttgcgataaggatagcgtcaccgtctacaaaataaggagtgccgtcggatacatccgaataagtcagcgtcacaccgtcattcgtatcatggatagactgtgcacgggcattcagatgaatctctatccctttcttttccaacacctctttcacgctgttcgctatatcctggtcgttgcggggcatgaaccggttgcctccttcgagaagggtaactttgctcccgaactcggcatacatcgaagcaaattccagtccgatatatcctccgcccacgataatcaggtgttgaggcagcacgttcaagtccaaaagagtagtgctggtatatactttctgactctccttaatcccgtctattgccggaataatcggtgtggaacccgtattgatgaagatttctttcccttgcagttcgatatccccttccggcagcgccaccttgatgatattagccgaaacgaaagaaccttctcccgtgtagaccgttacattgggacgtttgcttaacctttcataattattgtttcttaagaaagacgtcagtctgtttttccggccgatagcctgtttgtataagttcgcctgtttcggataatcatcgtgatagagcaaggcggcaatgccggcttcgtgcacgagcgttttcgtcgggatacaggcgatgttgggacacgttcctccatacatcatgcttgaacgttccacgacggcaacttgccagccgcggtttgaaagttcggcagcaagagtctttcctgctttgccgaaccctataatgattgcatcatattgtttcataacttctttcattaacgattaatattcaactatataacagtgagatgaattatttgttttcgtcgtttcgagaagttaaggaattcaaaagtagtgaggttagtcttttttcaatgttttgagtacacgttgtgacgagtcggatagaagcactactgcacctgccagtatgacgatatctttaatcaccagccgtcctgcaccggacagtaacgggaaaccgaattctccgctccccaggttgggtacccagacctccggcgtggtgacgaggaacgaaagtgtaccgagcgtcatgatgatagcgagcgaatcgcccaccagtcccactttggggaagaagatgcccaagaacaccagaataccgatactcatgataagcgctcccagtccgtaggagaaagtatatgtgttgttcgcttcgtgccatgcacggttttcgggtaccagagcaccttccggattcttgaagtttttgtactccggcgcttcctttgcatagaagaagctcatgaacgggctgttggctacaaacggaacaatcccgtcggcttcgtagtggaaatacttcagcccgcctatccatacgaatacgactagaatggctacacggataaacttggtaccaaaatttctcagacttgatgtgaaggtcagtaatgcgataaatttttctttcatattgttgtcgtttatgagtttaacttacaccgcaaaggtcgcgctttcctcataacctccaaatggcaatactgccgcattacttatcaattcttcccaatctgctcatttctgaactgcacggcactctgtcccgtcatgtttttgaagaaacggctgaaagaagcctgatcttcaaaccccagaatatcggctatctctttggcacttttgctgctgtacagcagcaggcgtttcgcttccgcttccacccgttcatgaatcacacggagtggggaaggcagtttgcacgtagaaaagatattcgacagggttttgggtgatttgtgcaacatatcggcatagtcctgcacctgtttcttagtcttgtaatactcgtccaccagattgtagtattggcggacaatctcgaagccggattccttttcccgtgtaatgtccaaccggtgacgggctatccgggtacattggatgataaaccttttaagaaggatgcgcagcatttcttcctgaaggctgtccgaaacggtgaactcgttttccatggctacggtgatatcgttcagttgccggcgttcctgctcgttgagggtgaagcggacaaggtgggacgaaccgttgaagaggaaaccgctgcacgacacctcatggtcattgccgtagatgcaatagaaattactgttgaacagtaaagttgtatattccccgtcgattgatttgaactcaagatgttgcaggtgtgtcagtgaaatcacatcatcctgcgacatcagcatttcctggtggtcgatttccaccgtgatacttcccttgcgcacccatataaacttgtagagtcctttttctttttgcagtgtcttctctgtctgataagaatccgtaagcgcgagtgttcctttaagttttgtgtgatattgttgcagcataattaatcctccatagctgatgcgtcaaatgataacggcagtaagtcgcctatacttttaatttcgtagatgcattctttgccgtaaagcagaatgcggatcggttgcccgtagcgtttctccgtttcgagaatcacctggcggcaggcaccgcagggaggaatcggattatcaataaagtctttctccgttctggcggcgatagcaagtgtgatgacgggctggtcggggtatcgggagttggcatagaacagtgtggtacgttccgcgcagagtcccgacggatatgcggcattttcctgattcgtgccggacaccacagttccatcgcccagcagtgcggctgcacccaccgagaaatgcgaataagggacatagctgcgtgcggttgcttccttggcagtggtcacaagagcccggtcggactcattcaactcatcatattgatatactttaataattgcggtaattgtgaggtctctcatatacgttaggggattggtttctacaattaatgttacaaagttaggaaagagattgataatcccaattatttttcagatttttgtgccttataatccacatctgaaataaaatggagaacaaactgtatagactggtctttttaactatggttttcttctttgcagtaggagcgcaggcgcaacgaagaaattcccgttacgtagaatatataaataagtatagtgatctggctgtggagcagatgaagcttcataagattccggctagtataacgctggcgcagggattgttggaaagcggagccggatatagccagttggcacgcaagagcaacaaccattttggtatcaagtgcggcggcagttggcgggggcgtagtgtccgccatgatgacgatgcgcgtaatgagtgtttccgtgcgtacagtaatccgcgtgattcgtacgaagaccactctgagtttctgagacgcggagcccgctatgcctttcttttcaaactggatattacagactataaaggttgggcacggggattgaagaaagccggatatgccaccgacccttcttatgccaaccgtctgattactatcatcgaagattatgacctgtataagtacgaccgtaagggtgtctactccgaacgtaagctaaggaaaaacccctggttgatgaatccgcatcagatttacatagccaatgatatcgcctatgttgtcgcccgccacggagatactttccaggatttgggcaaggaattaggcatcagttggaagaaacttgtgaagtataacgacttgcatcgtgaatataccttaatggaaggagacatcatctatctgaaatccaaaaagaagaaagcctccaaacctcatactgtatatgtggtgagggacggtgattccatgcatggcatttcccagaaatacggtatccggctcaaaaacctgtataagatgaatcgtaaggacggtgattatgtccccgaagtgggcgaccgcctgcgtcttcgttaggcagctttgaacacgctttttttcctttttgtaaaagttggacaaaaggaaaactaaatgactcatccggatgttattattaggataaaacatgattggagtatgagtctaaatattgcaaaagttgacaagaagcgtgtcgtcatagtaggcggtggtttcggtcgcctgaagttagctaataagctgaagaaatcaggctttcaggtggtattgattgataagaataattatcatcagtttcccccgttgatttatcaggtggcttcggcgggtatggaacctacttccatttcgttccctttccgtaaaattttccagcaccggaaagacttttatttccgaatggcggaagtacgcgccattttcccggaaaagaacatgatacagacttccattgggaaagccgaatacgattacctcgtcttggcggcaggcactaccaccaactttttcggtaataagcatatcgaagaagaggccatgccgatgaagaacgtctccgaagccatgggactgcggaatgctcttttggctaatctcgaacgggcgctgacctgctcaaccaaacaggaacaacaggaactgctgaatatcgtcattgtaggcggaggagccacaggcgtagaagtggccggtgtactttcggaaatgaagaagtttgtactgccgaacgattatcccgatatgccggctagcctgatgcatgtctatctggtggaagccggaccacgactgcttgccggaatgtcggaggattcatccgctcatgcggaaaaattccttcgtgaaatgggagtgaacatattgctgaacaagcgtgtggtcgactatcgcgatcataaggtaatgctagaagacggtagcgagattgccacccgtacctttatttgggtgagtggtgtgactggtgttactttcggaaacatggatgcttcgttgatagggcgtggcggacgtattaaagtcgatgaatttaaccgggtggagggaatgaagaacgtctttgccattggtgaccaatgtgtgcagttttctgataaagactaccccaacggacatcctcaactggcacaagtcgctatccagcagggtgaactcctggcaaagaatctgatgcgccttgaaaaaggagaggagatgaaacctttccattaccggaatctcggctcaatggcaactgtcggtcgtaaccgtgccgtggcggaatttagtaagataaagacgcaaggttggtttgcctgggtgttgtggctggtagttcatttgcgttctattcttggcgtgcgcaacaaggtggtggtactacttaactggatatggaactatttcacttacgaccagtccatgcgtatgattgtctatgcccggaaagcaaaggagattcgtgacagggaggtcgttgaagcgactacccacttaggaaaagacctgctgcacgaaccgcaacaaagcggacaggaaaaagcataatgtcgtcttatgcggcacaccgttctgtttctgaacggtaaattcgtacagggtgttcgatttcggacaccctttcttttgggctacattctctatttcagtagtttatgattctggcacggatttggtatatataagttccgaatgaatataatacatgataaaatcataaacaatcagatatggacagagaaattcctaaggaagttcgtcagaaagaacgtaataagaaaatcattcgttattcggccataggggtggcaggagttattgttgtcagtgtactcatctctttgatgagagtgggagtagaagaaaaagatcttgtgttctctacagtcgacaaaggagtgatcgaagtcagtgtcagcgcgtcgggaaaggtggttcctgcttttgaagagataatcaattcgcctattaactcccgtatccttgaaatctataaaaaaggaggcgatagcgtggagataggcactccgattttgaaactcgatcttcaaagtacggaaacacaataccagaaactgttggatgaagaacaaatgcgtcgttataaacttgaccagcttcgtgtcaacagccagaccaaactttccgatatggcgatgcagatcaaggtttcagccatgaaacttagccggatgaaggtggaactgcggaacgaacattatttggacagtctcggggcaggaacaacggataaagtccgtcaggcggaactaagctataatgttgcccagctcgaatacgaacaacttcaacagcagtttaaaaatgaacaggaagtggccgccgcagagttgaaggtgcaggaacttgatttcaatatcttccgtaagagtctggcggagatgaagcgtacgtttgaggatgcgcaaatacgttctccccgaaaagctatccttacctttattaataatcagattggtgcacagatttcgcagggcgaacaagtggcagtcatctccgatttgagtcatttcaaagtggaaggcgagattgccgatacgtacggtgaccgtgtgtcggcagggggaaaagcgattgtgaaaatcggcagtgataaattggaaggaactgtcagcagtgtgacaccgctttccaagaatggggtgatctctttcagcgtacagttgaaggaggataaccaccgccgtctgcgttccggattgaagacggatgtctatgtgatgaatgccgtgaaagaagatgtgatgcgtattgccaatggctctttctatgtgggacgcggtgaatatgaactgtttgtctgcgattcggatagcgaactggtcaaacgtaaagtacagttgggcgattccaactttgaatatgtagaagtgctgagcgggttgaaactgggcgacagggtagtggtgagcgatatgaactcctataaaaacaagaataaactgaaactaaaataaggtagaagatatggttgtcagggtatatttgaaacaagcgtggaacttaatgaagcagaatccgcttttcagcacgctctatattgtaggaacagggatttctatcgttatgacaatggtaatagctattgtgtattatgtgcggttggctcctgtttatccggagacgaacaggatgcgtacattggtggtgaaatccgctaaaatgacaaacgatgagagtactcattcttccaatatcagttatgcaatgttgaaagactggttctactcgttggaaagtgcggaagtaagtaccggagtgtctggtacaagttatgcccgggtgacaaacgacaaagaagaaattccgacttatgcaaggtatacggacgagaactttttccgtgtctttcctttggtctttctggaggggaagccatttactgaggccgatcgccgtagcggtattcataatgtagtactgacagatagttatgcacagcagcttttcggaacaactaagggagtggtcggtaaaaacttcttaatggattataccaatgtaaaagtggtgggtgttgtgaaaagtggcagttttcttacaccggactcgtatgcccaagtttatcttccttatagttgtcgcgatggctatgatgatgaaggaagccattgggcgttgggaggttatcgtgtctacattttgatgaaggaatcgaaaagtgtcacagatgtacaagatgaagtactggaacttgtccgtaaatttaatgtatcggatatgggtgacgggtggaagctggatttagtgggacaacccgaactttattggcatagcactttccgcctctggagtaatgtcgctgtcgactggggcagggtgatatggatgtttgtaggtatctttatggtattactttttgttcccgctttcaatttgagcggcatgatttctgcccgtatggaacgccagttaccggatttgggtatacgtaaggcgtttggtgcttcccgcaggcggttattggtacagattatctgggaaaatctactccttacaggcttgggaactcttctcggattggtaatagcttggattgtacttgctttgtcgggatatgagatattcagtttattcgaagtctttcctaagtttcctcctaaaggagtgaatttgggaatgggaattgatatgttttttgctccgttaatctttgtggcagcggctctgttctgtttattactgaatctgatatcagcgttaatacccgcatggaatgcattacgccatccgatagttgaatctttgaatgagcagaaatagggttatcaccttatatataatagaattagatcattatgttgaaactgatactgaaaaatctttgggcacggcgagtccggaatgcgtggttgcttgccgaactgatactggtcactgttctgacctggtatatcactgatcctctctttgtgttaagttataatcagacgttgcctttaggatacgaaccggacgggttgctgattgctcctatccgcagtttgccttccactgctcctgattataataaggaagaagcggattctcttcatacaatggaaaatatgcatcgtatgttacgtaagttgcgtgattatcccggtgtacagaatgctgctcctttggtgacttttgcttttccgggttcgggagggagttcgtataatacttatgcatacgatacattggcaataccggcgtccatatcctactttataccccataccggattctttgagacttttggtttcaaaacctttgaaggaaagacattgggagaattggacaatatggattatcagagaaatgatcttgttgtatctgctgatttgttgcagatccttccgaaggtcggccgattgaccggaaaacgactgttttataatagcgatgacgatgagaaggatacaacttttttctcaataaaaggagtcgtggagaaagtgcgttcccgtaattatgaacaaggtatgtattctttctttgaaccgcaattgaatgttcgttcgaaagaagtatggaacgggggatcttttttgattcgtctgcaaccggatgtgtccgagcaacgttttctgcatgacttccgtacttgggcatacagtaatctgaaagccggtaatctttatatacgggaggtctctacttacaaggaacaattggattacttggaatatggctccggtgttaccaataaataccggatgaatataatattagcggttttctttcttattaatctggcgttaggagtcaccggtgctttctggctccaaactcgtagccgccgtgaagaagtgggaattatgttgagctatggggcagcaccgggtaatatatgcaggctattaatgggagaagctgctatattggcttcgtttgcctggttggtggggtgtctgatttatttgcagtatggactggcagaaggcaactggtatgaacagggctatgtcgtgccttcactttggattaacaatttctggctgcattatatagtagtgtcacttatagtttatatcattattatcgttgtggtgttgctcggagtctttattccggcttacaagataagcaggattcctcccaccgaagccttgcgtgatgaataaatgatgaaagatacgaccggaaaaagagaaagacagattataataataacgatttaaatacttacgactgtgattaaattagttggcattaataagatttatcgcaccaatgagattgaaacggtagcgttggaggatgtaaaccttacagtgaataaaggagagttcctgagcattatggggccgtcaggttgtggtaaatccactttattgaacattatggggctattggatacaccaaccggtggaagtatagaagtagccggaacaagaattgaaagcatgaaagataaggaacttgccgctttccgtaataagaaactgggatttgtgtttcagtccttccacctgataaattcgctcaatgtgctggataatgttgagttgcctttactttatcgtcgtatgagtagcagtgaacgcaagcggttggcacaggacgttttggcaaaggtggggttaagtcaccggatgcgtcatttcccgtctcagctctccggtggtcagtgccagcgtgttgctgttgcccgtgcgattatcggcaatccggagattatccttgctgacgagccgaccggtaacctggactccagaatgggagcggaagttatggaactgcttcaccggttgaataaggaagacggacggacgattgttatggtgacgcataatgaagaacaggcaaaacagacttcgcggacagttcgtttctttgacgggcatcaagtgcagtaaaaagttaaggctatttgcattgttttcaatataataacttatctttgtgcgaataatattgaaagaggtgcagatcttttgcttatgaaacaacgatatttctgtgtgtttgtagttctgtttattgccgttctttgtcaagcggcagcatcggagcgtacatacaatgtgctttttatccaatcgtatacttcgcagactccttggcatcgcgatttgaaccaaggtttggtgaaaggctttaaagataatggattgaaagtgaatataacgactgaatatctggatgcggatttttgggcattcagatctgagaaagtcattatgcgtcgtttctgtgagcgtgcccgtgacagggaaaccgatttgattgtgacatccagtgatgaggctttctatacgctctttgcgtgtggagactcgttgcccttgcaaataccggttgtgttttttggtattaagtatccggatgagaagctgtttgccgctcatcccaatgtctgcggatatacggtcaatcctgattttgatattattttgcgggaggcacagcgactgtttcccaaacgcaaagaggttatttgtgtgattgataatagttttctgagtaacaagggactggaggattttcaggaggaatgggaagtctttcagaaagataatcccgattatgacatgaagatatataacacacaaaatcagacaaccagccatattatttctgctatttgctatccgcgtaatagttacggacgtgtggtaattgctcccaaatggtctccttttctttcttttgtaggtaaaaactcgaaagcccctgtttttgctacacagaatgttggtttgaccaacggagtgttcggtgcttatgattgcgatgcctatacttcggcaatgcaggccgcacagagagcttcttccgtattaaaaggaacatctcccaaagacgtcggggttactgagattccgcaagggtttatatatgactacaagcaactggaattttttcatgtcaatcctgacaagataggctcgaaaggaactgttgtcaatgaaccctattgggagaaatataaactcttgtttattcttctttatccgtctattttggcattattgattgcgtctatcgtatggttgatgcgtgttaatcgtcgtgaggccaaacggagggtacaggcacagacccgtttgttggtacagaataaaatggtggaacaacgcaatgagtttgacaatgtcttccattccattcgcgacggtgtcattacgtatgataccgatttacatatccatttcaccaaccgttccctgttgcaaatgctacatttgccgttcgatataggcggacgtgtgtatgaaggaatgatggcgggaagcattttcaagatttatcataatggtcaggatatcctccataaaatgttgaaggaagtagcaaagaccggaaagagtgttatgataccgcaaggtgcctttatgaaagaagtacatagtgacaaatatttccccgtatcgggagaaatcgtgcctatcttttcaagggaagaaattaccggtatggctctttctgcacgtaatatatcggatgaagagatgcagaagcgtttcttcgacatggcagtggacgagagcgctatttatccgtggcagtttgatatggaaacaaattgctttatttttccgcaaggctttctggtgaggctcggttatgatgaagctgttactaccatttctcgcgaagaaatggatcgtacgattcatccggatgatataaaagaaatacgtgttctttttgacaaggccttgtcgggtgaagaagaaagcacacgtttgaacttccgccagcgtaatgtgaaaggcgaatatgagtggtgggaataccgttcttctattgttaccggcttgacgcaggattctctctataatatattaggtgtatgtcagagtatccagcggtataagactgctgagcaagagatgcgggaggcgcgtgataaggcgcttcaggcggataaattgaagtctgccttccttgccaatatgagccacgaaatccgcactccgctgaatgctatcgtcggtttctccgatttgttgagtgatacgagtaactttaccgaagaagaggtgacgcagtttattgccacaatcaacaagaactgcggattgttactggctttgattaacgatattctcgatttgtcgcgcatcgaatcgggaacaatggaatttatgtttgcggaacataacctgcctttattgctcaaaactgtccatgattcgcagcgcctgaatatgcctgcgggcgtagaactggtactgcgtatgcctgcgggcgacaagaaatatcttacgacagataatgtccgcctgcaacaggtagtcaataaccttattaataacgctgccaagttcaccggtagcggctttatcactttcggttatgaagaagatgaagaaccgggttatacccggattttcgtagaagatacgggagtcggtatttcggaagaaggtatccgccatatcttcgagcggttctataaggtcgataactttacgcagggggcaggtttgggattgagcatttgccagactattgtcgaacgtctgaaaggaactatcagtgtcacttccgaagtaggcaaaggcacccgctttacggtacgtcttcctaactactgcgaatagacacccgtacctgctacaaacaatactaaaacggctgcatacataatcgaacgttcatttttgagcatagtgtccgaaaatgaacactgttcttattctttaattgattgaaaataaataccttattcttttggcacatcgtttgaacctccttaggtgaaaaatatagtgcgtaatgaaaaagaaaagtatattgtttgctcttgctgctgtttgcctgcctgtggtattatcggcacagcaggaaaggaagataaccttgaatgaagctattgctatggcacgcgtgcaatccgtagatgccgccgttgccctgaatgaattgaaaactgcctattgggaatatcgtaccttccgtgccgatcttttgccggaagtcaacctgaccggtacattgcctaattacaacaagtcttatggctcctatcagaatgcagacggttcatacagctttgtccgtaacagtgctttgggactttccggcgacctttccattgaccagaacatctggcttaccggcggtaaactttcattggtgtcttcgctcgactatatgaagcagttgggctccggaggcgaccgtcacttcatgtctgttcccattacgctgaaactcacgcaaccgattcttggcgtaaacaacgtgaaatggaacaggcgcattgaaccggtacgttatgcggaagcaaaagctgcttttatcaccgctaccgaagaagtaaccatgcgggcaatcacctattattttaatctcctgctggccgaagaaaacttggggacagccaggcaaaacctctccaatgccgaccacctctacaaagtagcacttgctaaacgtgaaatggggcagatctccgaaaacgaactcttgcaactgaaactttccgccttgaatgcaaaagcttctttgacggaggccgaaagtgacctcaatgccaagatgttccagcttcgcgcctttttgggagtgggagaggatgaaaatctgcgtcccgtcattcccgaaactgtggacggaacgaaaatggaatacaatcaagtgttgagcaaagctttagaacgtaactcatttgctcagaacattcgtcgccgacagttggaagctgattatgaagtggccacggcacgcggtaacctgcgtagcatcgatctgtttgcaagtgtggggtataccggagagaatcgtgatttccctgctgtttacaagaatttgcaggataaccaaattgtgcaggtcggcgttaagattcctattctggactggggaaaacgccggggtaaagttcgggttgccaagagcaaccgtgaagtggtgctttccagaatccgtcaggaacagataaacttcaatcagaacattttcctgttagtggagaatttcaataatcaggcgcagcagttagctattgcaaaggaagctgatctcatagcgcagcaacgttacaagaccagtattgaaacctttctgattggcaagattaatacgctggacctgaacgatgctcaaagttccaaagatgcggcgcgtcagaagcacatttccgagctctattattattggtattatttttatcagattcgtagcctgacgctttgggatttccgtaccaataccgaactggaagccgattttgatgaaatagtgcgacaataaaaaaggaaaggtccataaagacagtatttttttgtagatttgcatcatcacagtaatagaaaaggaagctctgatagaatatagaataaggaatacgaactatgattctgataattgacgatgatagcgcggtacgttcttcgcttagttttatgttgaagcgtgcgggatacgaagcacaggtagttcccggtccccgggaagctatcgaggtagtgcgtacggtagctccggatttgatacttatggatatgaacttcactctctcaacgacaggtgaagaaggtttgactctactcaaacaagtgaaagtgttccgtcccgacactccggtgatactgatgacagcttgggggagtatccaacttgccgtgcagggaatgcaggcaggagcttttgactttattcccaaaccgtggaacaacgctgccctgctgcaacgtatcgagacggccttggaactttccactgctcctaaagaaacaacgcaggaacagaacgacgcattcaatcgtaatcatatcatcggtcgtagccaaggcttgacggacgtattgaataccattgcccgcattgcaaagaccaacgcctccgtattaataacaggcgaaagcggtacaggtaaggaactgatagccgaagcgatccatattaacagccagcgtgctaagcatccttttgtaaaagtaaacctcggaggaatttcccaaagcctgtttgaaagtgaaatgttcgggcacaagaaaggagcttttaccgacgcttccgccgaccgtaccggacgtttcgaaatggcagacaagggaacgatcttccttgatgaaataggcgacctcgacctttcctgtcaggtgaagcttctgcgtgtattgcaggatcagaccttcgaagtgctcggcgacagtcgtccccgcaaaacggacatccgtgtagtttccgccaccaatgccgatttgcgcaaaatggtgaatgaacgtactttccgtgaagacttgttctatcgtatcaatctgataaccgttaaactacccgctttgcgcgaacgccgtgaggacatccctttgctggtgcgtcacttcgctgaccgtcaggcagagacgaacggattgcctcgcacggaattttccgccgatgccatgcaatttttgagccgcctgccttatccgggaaatatccgcgaattgaagaacttggtggaacgtacgatacttgtcagtggcaagcctactctcgacgcatccgatttcgacgcccagtatatccgccataacgatcagaaagcagccgaaagtacttcttttatcggcatgactttggacgaaatagagcgtcagaccatacttcaggctttagaacggcataaaggtaacctgagtcaggtagctatggcattaggtatcagtcgtgccgccctttaccggaggcttgaaaagcataatataaattatacgttataatagcttgtatattgtggctctgtctgatgatgcagactgataattaccagtgaatcatataacttaaaactatttgtccgtgcgaatcaaaggcttcttttacatattcgtcatcttgttgctgattttgggaattggcttgctttgcctttccggccagttacgtccggctttcttttatgtaggagaggggctgatcctgttcatcttggtctatttggttttcttttatcgtaagatagtgaaacctttgaacacgattggaagcggtatggaattgttacacgagcaggatttcagtagtcgactgagccgggtggggcagtacgaagccgaccgtatcgtgaatatcttcaaccgcatgatggaacaactcaagaacgaacgcctccgtctgcgcgaacagaatcattttctcgatttgatgattaaggcttctcctatgggagttatcatcacctcccttgacgacgaactttcggaacttaaccctatggcgttgaaaatgctcggtgtccgcttcgaagatgttcaggggaaaaagatgaaagacgttgactccccgttagccggggaacttgccagtctgccgagaggtgagacagtaaccgtccgcctgaatgactcgaacatttaccgatgcatccattcctcctttatcgaccgtggattccaacatcctttctttctgatcgaaagccttacggatgaagtgatgaaagctgagaagaaagcctatgagaaagtaatccgtatgatagcccacgaagtgaacaataccactgcgggaattacctctacgttggacaccgtagagcaagcgcttactacggaagaaggtatggaagacatctgcgatgtgatgcgtgtctgcattgaacgctgtttctccatgagccgcttcatcactcgctttgccgatgtagtgaagattcccgaaccgacgtattctcttgtcaatctcaacgacctagtctttgcttgtaaacgtttcatggaaggaatgtgcaacgaccgccatatcactctccgcatggagatagacgaaagtctgccggacgtaaaactggacagctccctgtttgaacaagtgcttgtcaatatcattaagaatgcggcggagagtatcgcaccggaggggaaaagcattgtgcctgaagacgaaagtccggaacccaaaggagaaatcattatccgtaccctgtctcctgctacgatcgaggtgatagacaacggcagagggatcagtaaagagacagaagccaaactgttcagccccttcttttcaacgaaaccgaacggtcaggggatcgggcttatctttatccgtgaagtcctgatgcgtcacggatgtactttctctctgcgtacttattccgacggattaaccaaatttcgtattctttttccttaaatgtgataaatgagaacagttcttccgtcaaacagaactattaattgtccccaaatacccttacctttgccccgctcaattcaatagaatttaaggtatgagactaatggtaaaaggtgtactaacgctctttcttttcttgactatcagtattccgctaagcgcgcagtatatactgcaaggcgtggtgactgattctctgacaaaggaacctttaccttatgcatctgtacgtctgaaagacacgaccgaaggaacgaccaccggaagcgacggacgtttctacttcaagaccagccgttccgaagcagtgctggtagtttcagtgataggctataatgattacagccggcagattcgtcctgcccggaatgcatcttataaaatcgccctttcacccacttcgtattccctcaatgaagtcgtagtaaagcccaaacgcgaacactaccgtaagaaagacaatcctgccgtagaatttgtccgtcacatgatagagcatcgtgacgaccattcgcctgacgaaaaagatttctggcaacgtgaacgctacgagaaaactaccttcgcactgaacaactttgatgaagaaaaacagaaaaaatggctctaccgcaagttcgatttcctcacggaatatgtagatacctccgccgtgaccggaaaaccgatccttaccgtatccgcccgtgaactgctcgctacggattattaccgtaaatcccctcatgccgagaaacaatgggtgaaaggccgcaaacaggcaggtgtcgacgagtttctttccaaacaaggaatgcaggcagctatcaacgaggtgttcaaagacgttgatatttacgagaataacatctccttgttcaccaacaaatttgtcagtcccctgtcgcgcatcggtacaggattctataaatactacctaatggacaccttgcagatagcaggtgaacaatgcgtagaccttgcctttactccctttaactcagaatctttcggctttaacggacacctgtatgtgacactcgactccacctatttcgtgaagcgtgccgtattcaatttcccgaaaaagataaacctgaactttgtcgattatatgttgctcgaacaggaatttaaacgtgccgaagacggtacgcgcctgctcgaccacgaaagtattaccgtagaattcaagctgaccgaaggacaggacggtatctttgcccgtcgcgtagcggattatacgaactacacatttactcccactgccgaagcggacaaagccttcgccaagccggagcgtatcattgaagaaacggaagccctgtctcgtcccgcaaccttctgggcggagaaccgtccgcaagccgctatctccgaacaggagaactccgtggacaagctgatgacgcaactgcgcggttatccggtttactactggacggagaagattctctctatcctctttaccggatacattcctacttccaaagaagcccctcttttctatatcggcccgatgaatgccaccattagcggtaacacgctcgaaggtccccgtctccgtgccggaggaatgactaccgcatggctcaatccgcaccttttcggtaaaggttacatcgcctacggcttcaaggacgaacgggtgaaaggactggcggaactggaatactctttcaagaaaaagaaagagtacgccaacgaatttcctatccactcgttaaaactacgttacgagtcagacgtcaatcaatatgggcagaactatctctacacaagtaaagataacgtattccttgccctgaaacgcgagaaagacgatcgcatcggttatttccggcaagccgagttgacctataccaacgagttctactcaggtttctccttccaactgacggcacgtcgtcggacagacgagtcctcctacctgattccctttcttcggaaagaaggtgatgtgctgactccggtcaaagaatactccaccagtgcggccgaattgaaactgcgctatgctccgaatgagaagttcttccagacgcagtggaaccgtttccccgtgtcgctggatgctccggtgttcacgctctcccataccattgccggaaagggagtgctgggaagcgattacacctacaaccataccgaagcgggagtgcagaagcgtttctggttctccgccttcggctatacggacgtcatactgaaagcaggaaaagtatgggacaaagtgcctttcccgttgctgataatgcctaatgccaacctttcctataccattcagcccgaatcctattcattgatgaatgccatggagtttatgaatgatgaatatttctcttgggacgtcacttatttcctcaacggctggctgttcaaccgtatcccgttgttgaaaaaactgaaatggcgtgaaatcgtttcatgccggggattgtatggtcatttgagcgataagaataatccggaattgagcgacggattgtttgcttttccgatagcggatacccgtgccatggggaaaacgccttacgtggaagtgggcgtaggtatcgaaaacatatttaaggtattacgcttggattacgtctggaggcttacctaccgtgattcacctggaatagacaagtccggtttgagaataagtctccacatgaccttttaaaagttaaatcctgctaattgcaatgtttatatgacaaataaagactgtattagtaattaattaatcttatttttgcatcaattttagtttaattttaatagaatagaaatgaaacaagaaattaaacccgctaccggacgcctcggtgtgttggtagttggagtcggtggtgcggttgccaccacaatgattgtaggtacactagcctctcgcaagggactggcaaaaccgataggatctattacccagttagccacaatgcgcatggaaaacaacgaagaaaaactcatcaaggacgttgtgcccttgacggatttgaacgacattgttttcggaggttgggacattttcccggataatgcatacgaagctgctatgtacgctgaggttctgaaagaaaaggacctgaacggagtgaaagacgaattggaagctatcaagcctatgccggctgctttcgaccacaactgggcaaaacgtctgaacggtacgcacatcaagaaagctgctacccgttgggaaatggtagagcaactgcgtcaggacatccgcgacttcaaggctgccaacaactgtgaacgcattgtggtactttgggctgcaagtactgaaatctacattccgttgtcagacgaacacatgtcactcgctgctttggaaaaagcgatgaaggacaacaacacagaagtgatctctccgagtatgtgctatgcatacgctgctatcgcagaaggcgctccgttcgtaatgggtgctcctaacctgtgtgtagacactccggctatgtgggaattctccaagcagaagaatgtacctatcgcaggaaaagacttcaagagcggtcagacactgatgaaaaccgtattggctccgatgttcaagacccgtatgctgggtgtgaacggctggttctctaccaacattctcggtaaccgcgacggcgaagtgcttgatgatccggacaacttcaagacaaaagaagtcagcaaactgtctgtaatcgacacgatctttgaacccgaaaaatatcctgatctctacggagacgtttatcataaagtacgtatcaactactatcctccccgcaaggacaacaaagaggcatgggacaacatcgacatcttcggttggatgggctatcctatggaaatcaaggtaaacttcctttgccgtgactctatcctcgctgctcctatcgcgctcgatctggtattgttcagtgacttggctatgcgtgcaggtatgtgcggcatccagacttggttgtcattcttctgcaagagcccgatgcacgacttcgaacaccaacccgaacatgacttgtttactcaatggagaatggtaaaacagacattgcgtaacatgattggcgaaaaagaacccgattacttagcttaatcaggaaccaagaataataaagttgagattgaggtttgccttactgaaaagacgggtggatgctcaacctcaactttttaattagtaacttgtaatttaatgaagaaagctccttttctacctgtattgataggcacgggctttggctccggtttttctccttttgctcccggtaccgccggggcgttgctggcttctatcatctggattgcactttatcttctgctccctttttctgttgtcttatggattactgccgcgttggtgattgtgtttactttcgccgggatctgggctgccgataagctggaggcttgttggggggaagatccttcgcgtgtagtggtggatgaaatggtcggagtgtggataccattgcttgccgttcccgacaatgacaaatggatatggtatgtagtggcggctttcgtcctgttccgtacattcgacattgccaagccattgggcatccgcaaaatggagagtctcagaggtggggtaggtgtgatgatggatgatatactggcaggggtatatagttttatcttgttagcaggagtaagatgtgtgattggctgagaaaagttgcacggatgatttcccagaagggtggcttcttcatgtttttgagggcgcagctttcggctcaaatggcaactattgcagactttctggttacaattcttctggtgaggctgtttgaagtctactatgtatatgctaccctcgcaggggctgtatacggaggaattgtcaattgcgtaattaattataaatggacctttaaatcgacaggaaagaaaacgaacgttgctgtaaagtttatccttgtgtgggtatgcagcatctggctgaacacgtggggaacgtatgcgctgacggaatcattggcaaagattccttgggtgcgcgatacgctcagccagtatttcggcgactttttcattatccccaaaatggcggtagcggttatcgtcgcattattctggaattataatatgcaccgcttttttgtataccggaatataaacataggaagtttgttcagaaaaagagattgaaataaaaacagaagatttagataaaaacagatttagacacaatatgaattacagagattatttgcaacagttgatttataagattatcaatcctttgatacacggaatgattaaaatcggaatcactcccaattttatcactacaaccggatttatcctgaacgtggtggcagcaggaatgtttgtctatgccggtatctgtggcggccggaatgaccttgctatcgtcggttgggcgggaggtgttattctgtttgccggattgttcgatatgatggacggtcgtgtggcgcggttgggaaacatgagttccaaattcggtgcactctatgattcggtgctcgaccgttacagcgaactgatgacatttttcggtatctgctactacctgtcgatgaaagattatttcttttatgccctgattgcgtttgtggcattgatcggttcgttaatggtgagctatgttcgtgcacgtgccgaaggattaggtatcgagtgtaaagtaggattcatgcagcgtccggaacgtgtggtactcaccagtctgggagcgttgttctgcggtgtattcaaagatatcacggctttcgacccgatgttgatactgattgtacctttggctttcgttgccgtatttgccaatatcacagctttcgcgcgtgtgagacattgctataaggtaatgatgaaataattgtccgaaaagctaaatagtattggtatattaacaccttattagaatgaaaatagttattgaactgccgtcaaagaatgaagccctgattactgtaatcactatggctctttttcttttgctgacaggtgtcttcatcggacttcgttccgaacatttcttaatggtggcactctatctggtcttattctttgccgggctacccacccgtaaacttgcattagccctgttgccttttgccattttcggaatctcctacgactggatgcgtatctgtcccaattacgaagtgaacccgattgatgtagccggattatacaatctggagaaatctcttttcggggtcatggacaacggtatcctgattaccccgtgcgaatatttcgctgcccataactggccggttgcagatgtctttgccggcattttttatctgtgttgggttcccgtgcctatcctgttcggtctttgcctgtacttcaagaagcagagaaaaacatatctccgctttgcgttggtatttctgctggtcaacttaatcggctttgccggttattacattcatcctgctgctcccccctggtatgccattaattacggtttcgaaccgatactgaacactccgggcaacgtagccggtctgggacgtttcgacgctttcttcggtgtgacgattttcgactctatctacgggcgcaatgccaatgtttttgccgcagtgccttcgcttcatgccgcctatatggtggtggctctggtatatgctatcattggcaaatgcaggtggtatgtgattactctctttgccgttatcatgctgggcatttggggaacggctgtttattcctgtcaccactacatcattgatgtgttgctcggtatatcctgcgcattactcggttggctggtgtttgaatacgggctgatgaaaattccggcatttaatagattctttgacaggtattataagtatataaagtaaaatatacaggtatataagaagcagtgaagaacaagtaccgcaatatattcctcgcttttggcatcattgccgtcctgataatgatattcacattcgatatggattatcgggaactttgggtgaatctgaagcgtgcaggaatatatttgcccttggtcttgttgctttggctgtttgtctaccttattaatacgctgtcatggtatatcatcatccgtagcggaggcaaaccgggcttttccttttcccggctttataaatttaccgtaacaggctttgcgctcaattatgtgacacccgtcgggctcatgggaggcgagccttatcggattatggagctgaaaccctttatcggaatcgaaagggctacctcttcggtgattctctacgtgatgatgcacatcttctcccacttttgtttctggctgacttccgtcctgttgtatgtatgtctctatcccgtagggtgggtcatgagcgttattctgggagctatcactttattctgcctgctggttaccgtcctttttataaaaggctaccggcacggtatggcagttgcctttatccgcatgggtagccgtctcccttttctaaagaagaaagtacttcattttgccgaaacccataaagagaaactggaaaacatagataagcaaatcgccctccttcaccggcagaagaaacgtactttttattcggccctctttctagaatacacggctcgtgttgtcagttgccttgagatctggctgatacttaatgtgctgacaacaaacgtcagctttgccgactgctgcctgattgctgccttttcctccttgttggccaatcttttgttcttcttgccgatgcagctcggtggacgtgaaggaggctttgcacttgccgtaggtggcctctccctttccggagcctacggggtttatgctgcactgattacccgtgtccgcgaaatggtctggatcgtgatcgggcttgctctgatgaaggttggaaacaggaaaggaaattagccggcatggcatactgcgtcaattttaagccggaaaagaaaattctcgtttggctttgaaaaatgatgcttcttcaaatttggtggtaatttaactagtcggtggtatctccattcccctccttcggggaaggaggggtggctgaaagccggggtggtaggcggatacacaatgttgataataaccgacttacgcattcacctaccacctccccctacggggactcctccttcccgaaggaggagaatggagaatactatcgactatcaaattattgttgaatactatcgactatcaactttcaaattattattttcctaattaattttaccaccaaatttgaagaaaaacctgaaaaataaggaagtatcgtttggatagctcgtgtgaatagttaactttgcagttactaacatcttaaaaataagaacatgagaaaactaactacctttttgttgcttctggcaatgttgattccaacggccggagcgcagtcaaccgacatctttaaaaagaagaaaaagaaaaacagtaagacggaagctgtcgacaaagcgaaagccgactccatagcgaaagccaagaaatctcctttccaaccttatgcaagcgtgatcaccggtaaagccaagactatgaacggtttcttcaaggtgcactgtatagaaggaaaatacttcttcgaaatccccgattccctgtttggacgggatattctgattgtcaaccgtattgtaaaggccccggtggacaaacaaaaacgtaaagccggctatccgggcgaccatatcagcgacgaagtgatacgtttcgaactgggacgggacaacaaactgtttatccgtcagatctcttatctggaacattccaccgatacactgggaatgtatcaggcagtgctgaactccaacgtgcaacctatcgttgccaccttcccgctgaagacgatgcgcaaggacagcctgacgaaaaactatgtgatcgaaatgaccgactttatccgcagggataatgatatgttctctttctccaactatgcgaaagataatatcggggcgacttcaatgatctccgacgccagctatatcgacaccttgaaagccttcccgcagaatatcgaaatccgcaccgtgcgcaccttccaacggaaaccgcctatgggcagcgctcttgagaaaatgattgctcaatactacaactccaccggtccgatgacttacgaactgaacagctctatgctgctcctgcccaaagagccgatgaaaccgcgactctatgacccccgcgtaggctattttgctgtcggctataaagactttgacggtaacccgcacggcatgaaatacaaagcgaacatcacccgttggcgtctcgaaccgaaagacgaggacaaagaaagatatctgagaggagaacttgtagaacccaagaaaccgatcgttatttacatcgaccctgctactcctaagaaatgggttccctacctgattcaaggtgtcaacgactggcagaaagccttcgagaaagccggattcaagaatgccattatcggtaaggaagcccccacggacgatcctacctggagtttggaagacgcccgccactcggctatcgtctataagccttccgacattccgaacgcaagcggtcctcacgtacacgatccccgcagcggtgaaattctggaaacacatatcaactggtatcacaatgtaatgttgttgctctacaactggtatatcgtacaggccggagccatagacccgggggcacgcaaacctcagtttgacgatgaactcatgggcgaattgatacgctttgtgtcttctcatgaagtaggccacacactcggcttgcgtcataacttcggttcttccgctaccgttccggtagagaaactgagagacaaagcatgggtggaagccaacggccacaccccatctatcatggactacgcacgtttcaactacatcgcccagccggaagacagcatctcacgtgccggaatcttcccgcgcatcggtatctatgacgattggtctatcgagtgggggtatcgctggatgcccgaattcaagacggcggaagatgaaattcctcacatgaacaagtggattatcagtaagctgaaagaagacaagcgttacaccttcggtacggaaagcgaccgcgacgatccccgcaaccagaacgaagacttgggagacgatgctatgctggctggtacatatggtatcaagaacctgaaacgtatcatgcccgaaattatgaagtggacgtacgagccgaacgaaggttacgagaaagcaagaactttatatagtaatgtcgccggacaattctctctgtatatgggacacgtggcgaccaatgttgccggtatttacagcaccccgatttcggtagagcagaccgatgtgaaagcagtggaatttgtgccgaaagagatacagaagaaagcaatggccttcctgaacaaagaactgttcaccatgcctacctggctaatggatagccaactgttggagaaagcccaggtcaacacctccagttttattttcagtgtgcagagtggcatactgaaaggcttgcttagcagccgcacattggataaaatgacaactaacgagttgatgaacggtacgaaagcctacacttccgctgagatgtttcaggatttgagaaagagtatctggaatgatctgagaggagggaaaagacccgacctcaatcaacgtgccttgcagaaagtctatgtcaactcattgactgcaatgctcgagaagccgaagacgaacgccaatcagtatatgcccgattctctgtcggaagcatccgccattgcccgtgggcaactgacagatctccggagagaccttgccaatgcagcaagcgcttccggtggcatatacagaagccattacctgaacctgaaagcattgattgatactgcattcgaagcaaaataaaaggttgcttcttcaaatttggtggtaaacttaattaggaaaataataatttgaaagttgatagtcgatagtattcaacaataatttgatagtcgatagtattctccattctcctccttcgggaaggaggagtccccgtagggggaggtggtaggtgaatgcgtaagtcagttattatcaacattgtgtatccaccgactagttaaattaccaccaaatttgaagaagaatcaataaaagaaagaatttctttttgaataaacaggaaactccaactaatccgactttatcaatcggttagctggagtttcctgtttcatctttttagagaaaggagagcgcttttctcagtttacaccttcccccaatccttttcagcattaaagcagggacaagccttgatccattcttccggttctatctcaccgtttccgttcaggtcgggactgaggtcgcgatgtccgcagatgcggcagcccgggtaatccttcaataaagtgagaatcagcacacgcatcgaatgtttctgccattcggtacgggtatctttgggatgtcccttgcagtcgagtccgccttcgtagcagataccgatactttctttgttgaagccacgggtgtgtgcgccgatgcgttcgagaggtcgggtcgatttgatatccccatttttgcggatataaaaatggtatcccgtcccgttgaatccccgcctgcggtggcagatatccaagtcatattccgtaaactccctgtcctcacgtgtagcggaacagtggattactatcaactttataggtcgcatacgttctctttcacagcgcccgttgcgtacaatctttattgctgcattgcagggctgccgcctgtgcaagttgtccccgcagtgaaaagatctccgtatgcatttccttcaccctcgaactaaggtcaaaataatccttcaacaccttctccaattgctgcatcagaaaagtatattggtctttcaccagttcgctgaactcttttacctcctgcgccatgactttgcgcttcttgcggctgctgcccagaaagggcagcaccgtcataatgatttctataatcttatctaacatgaatgtgatttattaatgaagaatacctttaaacagacgggtcgggagtgacaccaccgccgcccggtttatcatttccgccgtttccgtcatcggagccgtcggtttcgccttcgcccttccccgcaaggacgaaatctacattattctcacttcgggtggcagtgtggctggtattcaccaggtgcagcgccttgtccgccacgaaacggacattcacccggcggatactgcgcaccgtgcaatctttctccttctccgtgccctcgctgctcaacgtgatgtggaacgtgcccaatccgtcgatcttcactttatcgccctgcgtgagcgacagacgcaactgctctacaaaagcctcgatagcgtgcttcacatctcccgctgtgagcgaagaattcgcctcgatcgcatccgccagcttattgacgtccataactctcacagtacccgatttctggcgtacataatacaacacctgcgaatcttcctgattcacatactttctgcgctgatagcgctccactaatacgttcataattgaaaaaagttaaggtttaagtaataatattttctgtcattattgacattacaaatatacaaaatctgaaaggagaagtcaagtattttgccatttattttatactgatttttgaaataaaacaaggcacggatgattgaaaattattgttgtataaaattgaatctatctcacactggaatcacttttactttgcatgtttcagcagaaactccaatggcggtacatagtccgtaattttcgtcatttccggattatgcccgaaataagcgtttccggtttccccgttgcgttgtttggctacgattataatgccgagcccttcggtgggataaccgctttcgcggtcggtcggtatgcgtgcgagggcagggcggtagagtagtaacacgacgtccgcatcctgctcgatcgctccgctctcgcggagttgtgacagttcggggcgaccggcgggacggccctccgacacgcggttcaactggctgagcaacaccacaggcacattcagttctttggcaagcagcttggccttgcgggtggcttgcgccacttcctgctctcggttacggttgttttgtcccgtcgtcatgtcgcatagttgcaggtaatcgatgataatcatgttgcactcattccggctttgcagcagccgggcgctgcaacggatgtgttccatgttgaccgatgtactgtcatctacgtgtatcgggagacgtgcgaggtcggcggctgtggcgtgtgcttctgccagttcctgcgtgctgactgttcccgaccgccaccggcgggcgctgatctcactggctgccgtcagccagcggtcggccagcctttccccttgcatctcaagactgtagacggctacggcatatcctgccattgccgcgttccgtgccagatgcaatgccatgccggttttccctacaccgggacgggcggcaagtactattagatcactgttctggagtccggacgtcatgcggtccagatccgtcagtccggtgggaatgccggtcactccgttcgtactcttggcgatacgtccctcggcttcgctcatggcggcgctcatcagtgcgtccatgtcgcgcaggtgggtgttgtggttgaactcaccttccaggcggtcgagcaggttgtgtgcatctatcagcgagtcgtcgatatccatggtttcgtccagcgaacaggcgagaagtttgttgaagcccaggatcatttcgcgccgcaggtatttttcgtgcacaatccggatgtggtattcgatgtgtgcggaacttgccactttactgctcagttgggtgataccatacggaccgcccgcttcttcgagctttccgcggtgtgaaagttcctctttcacggtgaggatgtcgattttggtacccgcctgatacatcgccagcatggcggcgtagattatctggtggcgtagcacgtaaaacatttcggggcgtagcttgtcggctaccagcggcatggcttcctgttctatcaggcaggcgccgaggatcgcttcctctatttcgggtgcttggggcgaaactctgttttcggtattcatcattaataggtgtattcgttcaggaaagctttgttcgataaataactgccggcatggaggagaaaattgacgttcgtctggtggaaataatatacttcgatgttgtcgattgccagttgttgttccttgtcactcagcttcttccactcgcgttgcgccttggcgatgttctccttgggaagctgcgtgatgctgtggtattcgttccagaacagttggaacttctcgttgacagctttctttttctgtttcccggcatcgggcagtcccacccatttgtcatattcgacgacgcgtatgtgcagggatgtattgttggggtgggggatgatttcgatgattccccgggtggcaagtccgtgcatgaagcggaaagtcttcccggtggaccagtggagaacgcggctccagtcgcggtaactgaacaggctttcacctcttttgcacgggcagttcttgttgcagcggtcgttgtatagcgtttccgaatagttgactttcatcaggattttcaggagtgcctctatctctccctcttgcaggtgcggattttctatctgttgttgcaataaggttttcgggataatgagaaaaccatgctttgtcatggcttggaaattaaatttgttcattttggcttatttaaaattttcggtaaaggtaatccctttgcgtatggcttgcaagaggcgttgtggtgtgtggatgactgtggacggttgcggacttcgaatgtacttccgctaactgttttttctctctgcggatgttctccggaggggatgatgaaacagatactccgtttctgtccggcagagcctttgatacagacaaacagagccttcgttcggttgaatcggaggctctgttttagttgaaaaatacggtcgtttttacgaacactttgtggaacacttttttcctactgcaaatagctgtatttttgagagttatctttctgtgggaaaaaatgccgaacgcaaagtggaatacataataaacgataaaagataaatgatatatttaaaaatatatagttcgatttttcttttaccttaattccgcaacactattacaaatataactttttaagtacctgagcaacaaaaagttgctcaggaatttgccatgtcagatttttcacctatcttagtgttgcaaatcaaaatatgtatcaaacccgacagacatggcaaaggtagcaattaaatccgagaaactcactccttttggaggaatattttcaataatggagcaatttgactccagactctcatctgtaatcgactcaaccctcggtatgagatgcaggctgtatggttatcaatacagcgaaatcatccgttcgcttatgagcgtttatttttgtggcggctcatgcatcgaggatgtcaccactcatctgatgtaccacctttcgcttcatccgacacttcgcacatgcagtgccgacacgattcttagagccataaaggaactgacccaggataacatttcctacacatccgacactggcaagacctacgacttcaacacggcagacaagctgaatacactgctcctcaattgcctattgtccacagggcagctgaaagagggcgaggggtatgacgttgacttcgaccaccagttcatagaggctgagaagtttgatgcgaagcctacatacaagaagttccttggttatcgccctggcgtggcggttattggcaacttgattgtcggcattgagaacagcgacggcaacacaaatgtccgtttccaccagaaggacacgctgaagaggttctttgaaaggtttgaacaaaacaagcttattatcaaccgtttcagagctgattgcggctcgtgttctgaagagatagtggaagagattgctaaacactgcaagaccttctatatccgtgctaaccgatgcagttcgctctacaatgacatctttgccctcagaggttggaagaaagtggaattgggcggcattgagtttgagctggcctccattctcatcgagaaatggaaagggaaggcataccgtcttgtgattcaaagacagaagcggatagacggcgaactcgacctgtgggaaggagaatacacctaccgctgcatccttacaaatgactacgagtcttccgagaaagagattgtcgaattctataacctccgtggagggaaggaacgcatcttcgatgatatgaataacggattcggctggaacaggcttccaaaatcctttatgggagaaaacacggtgtttcttctgcttatggcactcatacgcaacttctataaattcatcatggcgaggcttgacgtgaagaggttcggactcaaagcaacaagccgcatcaagacgtttgtctttaagttcatctctgtgccagccaaatgggtcaggacatcaaggaagtatgtgctgaatatctattcatgcaacaatgcttatgccaatgtgttccagaatgactttggataacaccgacaacttatagtcgtgattttgcgtattgcctcaagtcgcatggtggggtaaggggcatttatatgtctttatggtgacattcgatgcactgtgccccctttttactaacgatgcagattcttttcgcttctgtatcatattaggcgcgtagttgcggatttgaggataaactactcaaaagcgggactaggacagataaaacacgtggattctttgtattagggctttgttaacttctaaattatgccaaagatttccctcccctctgccgcttgtcagaagcaggggtaaagaactttcataatctatcgtatcatttttcagtattgactactccaaaagagcaggcgcaaaggtttctccgttacctatacagtaacggactaaatgcgttgggaacaagtttcgtgctcatattataagaactatgggcttaaagcaaaatgaaaaagaaaaggaggttacagaaattaatgaaggggcaatatccgggatttttgaatcgacatcgagagactatatttttattttttaatttataaattaaaagtttttttattatgaacaaaaagtttttaagtgcagtcctgtttggagcattgttagcgtctactacaggaacatttacatcttgtaaagactacgatgacgacatcaatggtctaagcgaacgtgtagatgcaatcgaaaaaacattggccgacttgaatacaaaatttggatcgttggcttatgtgaagtctgtgtcttttgctgatggaaaattagtagtaacggatcaaaatggaactccgactacttatactattcctgacaaagatactaatactaagtatagtgtggagatcagcaaaagtgtagagggcaatactactactgtaactgttactttgaagggggatgatggcagcacgtcttccgagtcatttactcttactgacaaggatactattactgaagatacaactttggatccttccttgttctggatggatgagaacggtgtgatctggtatggtttgaagacggacaaggataactgtataaaaacaggtgtcacggtgccattacataataaaacaagtgttgcaattattgattatgtagtagatggcgcaaaagtgggctgggatatcactgtcgataatgtaacgactcacttgtctgttctggatgttttgcctatcacaggtttctcatggattccgaaagattattataatggtattgaagctgtagcatttggctcatattcgtataataaggttgttggaacagcgacggctgataccacttatactgcaactggagatgaaacattatcttcattcccgggcgaagcgaatttctatattaatccggcttctgcatcgttagctcaaattagaggtggagctgaaggagcaaccgtactgtataaaaaagctacgaaccatactactagagctgatatcggtgctactgcaactcttagtatggaggacggtattttgaccgcgtctatcgttggtgatatgaatcaggctgaaactgatcctgaagcattggatatgttggctttgcgtatgactactactaatggtcaaacatttacaactaattattttgctgtatataaccagaaagaagaagtgtcattcacattagttgataattgcgaacttgaaagcaaaactattaaggaaacagataaacttgctactaaatggagtgatgtcaaaggtcaggatgcagcaattgatgcgaataatgtagcagcccccgctaatgcccatttggttcaagcgctacaatataacgaagctattgctggtgttgatttgaatgaatatgtagctgttgctatgacaaaagctggcgaaagtgaagttgttaatttggctgctaagaaactttcaattgaatatgtactgtgtgagtacgatgtaaatggaacagaccagattaactatgcaacgttggaaggctctacattgaaagctgtcaactacgaaggtgttaatatgtcatgcatcggaaaaactccgatagtgaaagctactgtaaaggatactaacaatggtaatgctgtagtagctgtagcttatattaaattcttatatgttggcaatgaatggacagtgagcaagaattacaaagcaccggtttcagaaactaagactgttgactgggagtgcttcgttgatcctgcgttgaattatacgacgactgtgaagtacatgagtactcaagtatatccgaatattggttctgaactcggcttgaatgcactgtcaaaagaagaatttgctaatatctatgaatttgtaacagatcaggctaacgttcctgaggaattcaagagcactaatataatttcaataacggaacttgccggcgctgaagataatgcagataatcgtcaggtagtatttaatattgacgagagtgctattagtaagattacagaggatggtacttatactttctacggcgtatacaagaaaacggatgcagctgccgcagcttcttctcaatatcgtcaatatccggtatatgttgctattccttatgttgtaaaggtacagaactatcctacattagcaaatggcggaattaaggatgttaatgattatcgtattactcaggcttgggaaaacggatttgcaatttgtaaaggtagcaaggaaacagataatggtgcagctttgtatcttgatttgaatgaggctattgatcttggagaatttgctgctgactatgctgactatgagttagatatcgttgatcctgaaacaggtgatcctgttgctgtactgggtagcgaatggtgtgcaattcatggtactaatcttgattggattgtacttacaaaacagttgactaacgaagaagaagttattgttcctgtaaaagtgtacgcagtactttgcaataatgataagattgaagccggtacggtaaatgtgaagttcgttaatccggccaaggtttctttgagtaagaatattataaatgtaaaggatggaacagaagcatatactactgaagatttgaagaagtatatcactattacatcttctaaagattcttctgttgagttgtataaagacggtgctctaactacggctggtgagaagattctgggtaagtcagctaatgttactattaatctggctaagggtagtgtcattccgactcaatgggaaaataagtttactctgaatgcagacggaacagtgacatggaatcttgaaggacagaatactcttgctaagggacaaaatgcaacttgtgatataaccttcacaattgaatacggtaaggttaaacctagtcaagttattacggactgtacagaaacaagtccggttcttggtggaggaaaacttaccggtaagtttactatcaaggcatggaatgctgatgagttcccggttgaataataactgaagttatatatttgagagagagtgtactcttatagtgcactctcttcttattaatcaaataatgaacgtttatgagaaagagtttatttataggattgctggccctatccagcacaatgatctttgctcagaatcaagaacaacgcataaaagaacctgaaaaaataactttcaagccgcattggttcattcaggcacaaataggggctgctcatactattggtgaagctaaatttaccgatcttgtatctcctgctgctgctctcaacgtgggttataagtttgctcctgcatttggtgcacgtgttggtgtgagtggttggcaggcaaaaggtggatgggttaatccggagcaggactaccaatataaatatcttcagggaaatgttgattttatgaccgacctgagtactctattctgcggcttcaatcctaaacgaatattcaatggttatctttttgtcggtgtaggtttgaatcatgcgtttgataatgatgaagcgaatgcattggatacaaaaacttatcaaatggaatatctttggcagggcagtaagaatcttgttgccggtcgtttagggcttggttgtgatcttcgtttgaatgatcggctgtctattaatatcgaaggtaacgctaatttgctttctgataagtttaactcaaagaaagccggtaattgtgactggcagattaatgcttttgtaggtttgagtattaaattaggcaaaagctatactcgaacggcaccggtgtattatgaaccggaacctgtggcagtggaacagccaaaaactacgcctgtaatagaaaaagaacaacctgaaaaggaagcggtaattgaaccgatgaagaagagtattttctttgctctgaattctgcaaagatacaagatgatcagatgattaaaatatcttctttgatagaatatcttgagaaacatcctgctgctaaggttactgtgacaggttatgcagatgctgataccggtaattctcggattaacggtgaattgtcaaagaaacgtgcaaataatgttgctgaaatcctgaaagcgaaaggtgttgctgctgataggataacagttgattataaaggtgataccgttcaaccttatactactccggaggaaaaccgggtaagtatttgcgtggctgaagaacgttaagaagtccgaacttgtgaaagtccgaacttttgcaatagaccctttcttcacctgagagtgaagattttacagcaaatgaggtgcttgtgaaagtatgtctttgctgtttcccacagaggatgccttccctaatttcccacaggcatcctctattatggttcttaatgcatctctctcattgcatcggtattatttgccggtcatgattttcccctataaacagagtggatgtttttaaggatagcaaaagcccgggcttgagaaagtccgggcttttcgtccttacatctccttctctcttattctaaaggaaaaatgttctttgtgaacaactcattttttattccaaccagttcttattcaacaaaaaagccttatctttgttgtaagatacacaatcaacacgtataatgggaagatttattaatccctttaccgattacggctttaagtttttattcggcagagaggtagaaaaggagttattaatcagcttcttaaatgatttgctcgtaggagagcatgtgataaccgacattcagttcctcaacaacgaacaacagccggaagtaaaaaatgaacgagggatcatctacgatatctactgcatgaccgatacaggtgagcgtattatcgtggaaatgcagaatcgggaacaaccttattttaaggaccgtgctcttttctatctctcaagggccattacgcaacaagccaaaaggggacaatggaatttccggttggatgctgtatatggagtgttcttcatgaactttgtaatggacaaggacatgcctgcaacgataaggacagatgttgtcttatccgaccgggctacaggaaagctctttaatgacaagtttcggcaaatctttatcgaattgccaaactttaataaagaagaggatgaatgcaatacggattttgaacgctggatttatatattaaagcatatggatacacttgacagaatgccttttaaggcacgaaaagccgtcttcgaacgactggaaaagctggcttccaaagcaaatatgacccaggaggaaagagcacagtacgaagaagaatggaaagtctacaatgactatttcaatacgctggattttgctgaaaagaaggggatgcagaaagaaaaggaagtaacagcccgtatcatgaaatccaaaggtctttctctcgaactaatttcggaatgtaccggacttacaaccgaagaaattgataaattggaatgatagaaacaaaaaggcgacccgtttcccacgagccgccttttctgtctatttgatttcgatttcttccttcatgtcgatttcttctccatgtgtatcatagaacacatattgtaagaaagcgagtttctgacttggaataaccttgataccgaatccgtatttcatctgccatttccgtttcagggaaacgagtccctgattgatgtaggcggcaacatacggatggacgtgtaacgagaatttcttaaccttcagtttgttgaccagataatcaattttactctccaaagtgtccgtaaagagaatggacgacttgatagtgccttttccgaagcaggtaggacaaatttcggtcgtgttgacgtccatagccggacgcacacgctggcgtgtaatctgcatcagcccgaatttgctgagcggcagaatattatgccgtgccctgtctttctgcatattggcacacatccgttcataaagcttctgacggttttcggcttcattcatgtcgatgaagtctacgacaatgataccacccatatctcttaatcgcagttggcgagccagctcgtcggcggctcccaggtttacttcgagtgcgttaccttcctgcccgttggcattcttggtgcggttaccgctgttcacgtctactacgtgaagcgcctcagtgtgctcaataatcagataggcaccactcttgtaagagactgttttaccaaacgatgatttaatctgcttggtgataccgaaattgtcgtaaatgggaagctggcctttgtacagtttcacgatgtttgcccggtcgggcgcgatcagtgatacatagtctttgatttcgttgtacacagcctcgtcgttgacgtgaatattctcaaaagaagggttgaagaggtcgcgcaacaaacctacggcgcgactggtttcttcataaatcaacgtcggatacttggtggctttctgtactttagccattgcatcttcccaatgtttaaccaggactctaagctctccgtcgagttcggctacgcgtttgccttcggctaccgtgcggacgatgacaccgaaatttttcggcttgatgctcatcagcaactgtttcaggcgggcgcgttcttcgctcgatttaattttttgcgaaacagaaaccttgtcattgaaagggataagcacgaggtagcgtccggcaaatgaaatctcggacgtcagtcgcggtcccttggtggagataggttcctttacgatttgcaccactacttcttgtcccaccttgagtgtgttggatacggttccgtccttgtcaagatcgggaagtagggttgctttgctgatagaagtcagcttcttcttgtcgcttaaagtctgctttataaacttttcgagtgagttaaattgaggacccaggtcaagataatgaaggaaagcgtctttctcgtaaccgacgtccacgaaacatgcattcagaccgggcatcaatttcttgatacgtcccaaatacatattgcccacggagaaagaaatgtttctcccttcgctttgaagttccaccagactcttatcttcgagaagagcgatagagacctctttgggttgtacgtcaactactagttcacttgtcactgtttgtttccttattattgattgaatctcatttactatgaacaacttttttgacaaattgttcattttgggttagctacttaaacaaagaacaaacttgaaagacatcgagcttcgcaagtttgttctttatttctgtgtgatccagacttaaaaattattttttgcttttatgtctgttctttcttagtctttttttacgcttgtgcgtagacattttatgtctttttttcttctttccgcttggcatagcttcacattttatgggttaatactcttgttaaatttatttttttactgagattgtaaatgtcttagccggtttgaaagccggaatgttgtgctcggggatgatgatagtagtattcttggaaatgttgcgagcagtcttctgagctcttttcttcaccacgaagctaccaaatccacgaaggtatacattctcatcgttagacaacgaatcttttacggcatccatgaatgcttcaactgttgtaagaacggttgtcttgtcaataccggttttctttgtaatctcgtttacaatatctgctttagtcatttttccttaaaaaaaatattattactaggtttttgctaattttttggactgcaaatatatagctttttggtctgctaaaaaaatatattctgcacatttttctaaaaaagtggaggcattaagttttcttagagtcaaaagagttacttttgtactgcttttggatagtatttgcaagataaatgtaagacgaacaaccgatatgggaatgaatatttttagtaaagcaattatagactggtataaggagaataaacgagaattgccctggcgggaatcttcggatccttatctgatatggatttccgaaattattcttcagcagacacgcgtggcgcaaggctacgattattttctacggtttatcaagcgttttcctgatgtgcagagcctggcggatgcggacgaggatgaggtgatgaagttctggcaggggttgggatattattcgcgtgcccgtaatcttcatgcggcggcgaaaagcatgaacggtgttttccctaagacatatccggaagtacttgctctgaaaggggtgggagagtatacggcagcggctatctgttcctttgcctatggaatgccttatgcggtggtggacggcaatgtgtatcgggtgctttcccgttatttcggtgttgatacgccgattgattcgacggaagggaagaagttgtttgctgccttggcggatgaaatgctggacaggaagcagccggctctttacaatcaggggattatggatttcggtgcggtacagtgtacgccacaatcgcctgactgcctgttttgcccgttggcggagagttgttcggcactttctgcgggaagggtggcacaactgccggtgaagcagcacaagacgaagacaacgaatcgttactttaattatatttatgtacgtgcgggcgcgtatacctttataaataaacggacggcggatgatatttggaagaatttgtttgaattgccgttgatagagacttcggttgctttgtcggaggaggagtttctggctttacccgaatttagggagttagtggcagagggggagaaaccggtcgtggtgcgttcggtttgcagagaggtgaagcacgtgctgtctcatcgggtgatttatgctaatttctatgaggtgactctgcccgcagagtcggcttctttcggtaactatcggaaaataaaggcggaggaactggggcaatatgccgtccccagattggtgcacgcttttattgagaagtatgtcgattcgaaataaaagttacaacaatccttgcattctattgttattctgtttaattttggcagcagatttgaattaaagaatgataaacttgatacatatatgtcagtgaacagagtgatattgataggtaacgtgggacaagatccacgggtgaaatactttgatacggggtcggcagtggcaacttttccgttggctacgaccgatcgcggatatacattgcaaaatggtacgcagattcccgaaagaactgaatggcataatattgtagcatccaatcgtctggctgaaatcgtggataagtatgtacacaaaggtgacaaactgtatctggaaggaaagatcagaactcgctcttacagcgaccagtcgggagctatgcgctatatcaccgagatctatgtggacaatatggaaatgttgactccgaaaggggccggccaaggtgcgggtacttctgcacaacagggggctgcaacaccgtcacaacagccgcagcaaatgcaacaaaaccaacagccgcagcagtcgcaggcgcaacctgtacaagataacccggcagatgatttgccgttctaaatactgtgacagtgtgccaactggtttataaaagctgattggcacattgtcttttgtttaactaaaatatatactctttggactcagatggttatttaagccaattggctgatattttcaacggtattaccgtaaacactccttctatctctgctattattgccatagtgctggctggtgtgctcctgcttgcttccggctttgcttcggcttcagaaatagcttttttctcgctttctccctcggacaagaatgatattgacgaacgcaaacatcctgctgacgaaaagataagctttcttctggatgattccgaacgtttgttggcaacgatattgattactaataattttgtgaacgtaaccattatcatgctctgcaatttcttctttatgaatgtgtttgtattccattctccgttggcagagttcctgatattgactgttattcttactttcttactgctgttgttcggtgaaatcatgccgaagatttattcggcgcagaagacgttggctttctgccgtttctccgcaccggggatttatgccttggaaaaggtattctatccgattgcttctgtcttggtgcgctctactactttcctgaacaagcacttcgccaagaagaatcataatatttccgtagatgaactgtcgcatgcactggagttgacggataaggcggaaatctccgaggagaataatattctggaagggattatccgttttggtggcgaaacggtaaaggaggtaatgacgtcgcgcctggatatggtcgatctggatatccgtacccctttcaaggaggtgatgcagtgtatcattgaaaatgcttattcgcgtattcctatttattccggttcgcgggataatataaaaggggtgttgtatattaaagaccttctgccgcatgtgaacaaaggagataacttccgttggcaatcattgatccggcctgcttattttgtgccggagacaaagatgattgatgatttgcttcgtgattttcaggcgaacaagattcatattgctatcgttgtggatgagttcggaggtacttccggactggtgacaatggaggatatcattgaagaaattgttggtgagatacatgatgaatatgatgatgaggaacgcacgtatgtcgtgttgaatgaccatacttggatatttgaagctaagactcagcttacggatttttacaagattgcgaaagtggacgaagatgagtttgagagagtggtaggggatgccgatacactggcagggatgttgcttgagattaaaggtgaatttcccgcattgcatgagaaggtgacttatcataattatgagtttgaagtgctggaaatggacagccgccgtattttaaaggtgaagtttacgatcctgccgaaagaagaaacggaaggggcggaagacaaagagtaaaatgggattatttctgcaagataaaacgaatgatacacaatgggctgtctggaaggtggaggaatcactggaggcattgctggctcttttacctgatgcgcgcagggtctgttgtgaacaggaacttttgcaatttgcttccgaacggagaaagatagagtggttgtctgtccgtgtcttattgtactttatgttgaaagaagataagcaaataggttattcttcggaaggcaaaccgtttctgactgatgattccttttttatcagtatttcgcatacgaaagggtatgtggcggtgattcttaatcccaaaactcctgttggcattgatattgaacaatatggcaaacgggtacataaagttttcgatcgttttattcgtccggatgagcaggtagaggcttatcagggagatactacgtggggggggctgttgcactggtcggcaaaggaaacggttttcaaatgtatgaagaatgccgatgctgatttgcggaaactttgtttatcgcattttattcctcaaaaggaaggcacttttcaggttagagaatatgcgacggaagggcagtcactcttttctgtggggtatcgtatctgtgaggactttgtgttgacgtggacttcgtgttgacgcggactatgtattctataaaaaataacggtgagcaatgagtggagtctccacaaattgttcaccgtttatctttggtcacttatctttcttgttaagtctgtaacttagtgcgccagacggacagaatgattgttttatttctcaattaacgtgatgccgtcaagacagaaataggcagcagtttttataccatattcatttttatcactagagtcgggtataaatttaacttttacagcattttggatcggggttaggtcaaaccatatccattctttaacaggaaggtcattatcggtcttataatttgctaataagatttctgcttttcctgtttcattaccagcttcatcgtatcctgttgctgtaactttataccaatctcccgccttgaaagcccttgcataaccgtctccttgtatcatacccatgtatgcccatgtactgtttgctatccaggttccttttaatttatagttagtatctaatatggtcagaattgctggagttccatattctccgtcggtactgtctacaccaatatacacactaccaattttagctttacctgttattggtgcaggactattggctgtttgattatctgttatattcatataagaaaatccggcaaaactataaccggaaccccagtcggcataatagtggttgaaattaattaagtttttaggatctttgaaatcagtttcttggaatgcctgattgttgggggtaccgtctgcgataaattgactgttttcctcggtcaatagattctcaaaactaacgaccacttcgttttttacatcatcgtcatcatccccgcaactgcaaaatacaaatactgacaacagtagtaataaagataatttcttcatgtccttttttaatttttagttattaattgttttattgattaattcttgaaatgcaggttttcgacagttgttacttctgtcgatatttctcccatttgccctgcgtcttgattgacggcagtcatgattttcacaaagtctatacaatccaaaacgatggattctccattgctgtctattgcccagtctattttaaaattactgccttctttatcattgcgatgattgtcggcatatccccacggatagcaatatcctacccataatccattttccggaacagcattgtcctttaagcgtgttccccggaatgttatttcattttcctgtatccatacaggataataggactcttggttatgaaaactgttccggaggatttcaccttcgtttccttgattgtctttccaagagacattctggtttgccggttccggtcgataataagtgatctcatatccacgtgtctccgtatctttcccgtattcgcttccggccagctcataccactcatcatcgggttctccattgccatttacatctttagatacaaatacgatacccggttcggcgcttccccctaattttcctgtttctgttttcagattgtaataagcatttccttttatcttgaaatcatactctccttctacgttcgggattgattgcgggaaacccagaacaatgtaaccgccgaatcctcctaaagtgatgattgatttttgtcgtattttgcgggttgcttctttcagtatatcatcataggtaaatccatttttataggcagatgtagtagtattgataaattgtcccggagccggcctgtactcccataccttattggcaaaagccaatgaattttctgtttctccggtatcatcaatatcgcttcgggaagccttgtcgctgaatacgattgtatttggattcagtccgatattattcaggcggaacaagagttgtccttgttggttgaaacaaagcaaatctccatatacggtgtagtcataagcgtctgtgatatatatattcccactgtagggattgacattgattccataaggagtgctgatattggttccgtccgtaatgaaattttcacggacagtttctcctgtttttagattgaatgtcttgatagaagcggtttgtgtactgtaattatagttatatagataagcaatctctccgtcaatagcaaagttttgtactctctcattatagtgggtgactacctttgtccggcagtctatttttgcgaaattataatctccggcttctacatcttcgccacgggtggctacataaacgactttttctttcgtatcggcaataatctttcccggattcggacctacgataattttatcggtttccttgaatgtagcgatgtcaaccacggacactgtattgtctacccccaatcccgacgcatggtccaatccgccggagttggaaacatataacttgtcatcctgtacacaaattccgtcaggattacgtcccactgttgtcatagcgtctatggtaagcgaagccgtgtcaatacgtgctaccgtaccgtcataagaacagacataggctttttctttatgaaaagcaatgtatcgcggttcccggggatttccgttctctgtcagcatttgaatctgtttcagcgagtttcccgtttggaaatccactatttctatcgtactggaaacgttggctacaatatatatcttgctaccgtaaattgccagatcattagccgtatctcccagtccccggtgattgatcgtcttgaaataattgcgtaccattcgctggttattgaaagaaaaacgcatcagcgaactgttattctgattgaacaatccttcgcacaacgcatagagttcggctgtatccgtctctgtcgggtcacctgtgatgtccgatgaggtgaagggcttgtcctccatatcatcgcaagcgttgagtaataatagcagcggcagacagaaccagaatatatatgtcaatttccttttcacgtccataatatccttttataatattaatatcttatcttcaacgttgccctgactgaacggccgggcatggggaagaactgaacaatctcgtaatttttatccagcagattcaaaacctctacgctaagagacgttgtaacttttcttatccggaagtctcggccggctgaaatactgtggtcgctgtaactggccaaccggttttcgggaatgttctgtcccaacgcataacgttttcccgaaaagaggaacgaataagataaatctatccagggtgtttcgatgcccgcttgtcccgaagcggagacacggggggtgtaggctatctgatgtttatatgtcgatttgttcgaactggcgtccggagttgtgacatctaatgcccgttgataagtatagttcccggaaaaattgatacggatactttcccagggttggagcgataggcttcctgtggcgtcaatacctttgatctctacactgcccaaattcctcatgctccacacagcaaggttcttggtcgggtaagcaatgattttgtccgtcactttgttataatatgcgtcaacggttgccgacaggtagggcaggaatgtacatacatttctgctatacgtcaaaccgatattgtattgacgggcattttcgggtttcaatttgctgttacccacttcctgataatataaatcattgaaactaggcaaacggaaaatatctttgtagaagaaacggacacgaaattcttcattccggaaaggcttgaatgtggcgctgacgtaaggagttaatttgcggtgattgcctgcgcttcctcccttgtcggcctgctcgttgataacggttgccaaggcggaagcagatagagtgaaccattcgttgacgtattttccggcaatggctgtcaaccacgaatagcgtgtgggatgtgcaaagtctgccatgttggcattcatcgtgttgatactgccgtcggtagacaatgaaaacgaaagattgttcagcagcctgtataacacggaggcggaaagatagtattcctgctggtaatagctgttctctgttttgccttcattgtttttgatagcagggtccagataatgctggtaactccagttccatttggcagaagtccggaatacccattgccggctgaattcctttttatattggctttgtataaatgcatttttgtcccagaggtgctgtgcggaaaagtcgttatatagcgtggtcgctttcggcaatcccctggaagactggaagtagtaagcttttagccgccattgctctttgttggagaagttgccgtaaagcccggcttcggcacggaacgtttcgacatccgtgttcttccgtttttcacgtgaagtcaggtcgtctgctgcgtttccataacgtagcgtgtacggatattgtccgtctgacgacatccattcaccgttcgccgaaactgtccattgggggctgagttgttgttccaataagatagagggattgacaagtccccacgaaccggttttgaaagcagcgcttatattagttcgtttccctttctcaaagcggggagtgagcgtctgtatgtccaatattcctgcagaagcgaagaaacgtgccggttggaagatattgtcactctgcccgttgctcaacgaaagttgatctacattatcaagtgagaaacggccgatgtcgatctgtcccgtctgacagtccgttatggcaattccgtcatagcctacgacggtgtgctgtgctcccaaactgcgtatggagacagttttcagacctcctatgcctccgtagtcttttacagtcacaccggcaaaatgcttcaccgcatcggacacttgcaaggcgtgcagattcttcagggcttctttggaaaatagttgtagaggtgcagtagaacggacctcacgggtctggtaaatatcagaaacggtaacctccggaataaaataggtatgcgttgtatccactttctgctgttgtgcaaaaagcggtatggatagaaattggcagcagaatgctgcacagatactcatataaaacgtcacatatctcatccttgattttctggctgttttcacattttaaaagtgtccgggcgaaatcccttcgaccggacacgctaaataaactttggcagagtttattaatttaaacatactttctctgaatcagagtgatgaatgaaatgatagacgaattgtccggttcattagactcaacgctttttcctcgaaagcagtgaaattggttgcacggcaggtcttctgacttgttcctgttgcgggcgccttcccggaagtttctttccagtggctaaaagtaggttgctcgcaacgtaatgtgtggaacttacagcagcgggactgttcaggatttacacctgattcccttttaatcgcttccctcgtatgtgagagttgcaaaccgatgcgcgacaaagatagatagtttatttgttttatgcaagaaagaagaagattattgatgtatcatcaggtattcttcaatcgcttgtgtggtagcatctttcaacaatacggttttctctttatttaataggtataaagtagggatcgctttcaggtcatacagttgtttctctttgattgtgaatttcttatcatatccgttaatccattctttgggaaattcattcagatgtttgcgccagtcatccaactcttcatcggggtagatagaaaggacgatcagcttcttctcctttatgagttggctgatgataggggcttgctttaaaccttcgattgtctccgtacaagcgtggcaaccgggattattgataaatagcagaagataatcggcattaagctgatagagggagccttgagcgccggaagcaagggtataggtgaagtttatagctttggtgcctatgcggttcttttgagctaattccaaccgtgccttggggcgtactttttctatctcttccaatacgggagaggctgccattgcttccaatacgggaatataaaattcctcgttacgcatcggagagttggggtcatataagtatttatccgctaaatcggtgatgtaggcgaatactttcttgtctacgtttgtgcggtcgatcgttttgcgtatagcttcctgtgcggttttgagggggacatgattcagaatgtcgcagtaatccacccacgcctgttcggttatttccggatgatgaatgtagttggtgtcggcgaagttcacattatcccagtagtgctttactaagaactcggcacgttgttccggtgctaccattatttgagggatagcgggcagcgtgaaagtcttgatagtgtcctgtgacacttcgtttttagtctggcttgaagcattcccgcttttgcaggaccaaaggaggaggaagcagagaatgggaaggatatttaagtttgttttcatgacttgctgttctacatttatctgattatttttcaagttgcaggcaaagataactccctttttattttattcaaaacattcttctttttttgttcggcaggatattatttgaagttatcagttaactataatttcgtcggagggacttgacaaatgcttttttatgttgtatatttgtagacagagaacgtgaaatcaataacagaagaatgaaaaagtatggaataaaagtagaaagtggtgtaattttacaacaaatatagattgtctcctccttttttgatgaggggaagggcgatcaatactggctaaaggctgcgaattttataaggttcgcagccttttttgttgtattatttcggatgtttttctgtgaatttttattttaaagtttataataaacggaggggacgtttataataaacgatcattgaatttattaataacgataagaacgtttatgtagtggaatgttcgtttttttatataacgcttattctaagtctcgagatttgtatttttatggtaataataattgaagtctttctctggtaattttttcggaacgtgtaagcaggctcgaatgaggtgatagaagtgatttacttcctcactacaaagttccggcattttggctgatgaattaaaagatgtttgtttggttgaattatagttaatatatatctgttttttgccattaaataataacgactaaaaaaatagtcatacatttgattcaatttaaaatcttgtaaataatggaactgacaaaggctgaagaacagattctgcactatctatggaaattaggagaagctactgtgcaggacatcctttcatgtatggaagaaacgggaaggccttcccgtaccacggtatctacaatcattcgtattcttgagaataaaggaatcgtggggcataagccgggttcgggacgcggctacatatattattcgctcatcaagaaagaagaatattcgcgcaagcaactattcggatttatcagtcgttactttgataattcttttgcatcgttgacttccttttttgctaaagaaagtaatttgacggtggatgaactggacgtacttcttgcagaagccaagcaaaagttggaagaagaaaaaggaaaggagtaaaacgatgtggatgttacttctgaaattgtccgtgctaactactcttttgtatagtttgtatcattggacaatgcgtgggaatacctttttcctgttcaatcgcttttccttgattggggggattgtgttgacgctggtattacctttcattcctatctattaccggactgtggcaatcgattcggcagttttgtcggaggagactttccaaatagggaatgccataattataaaaatgaaggtaaatgaagttaccgatatcggaagaataatcactcttggctatttttcggggattatgttccttatgctatcacgtggctggagtattttccggttgctggcacatataagtaaaggtatcaaaactaccgtctcaggttttacattagtagaatctgtggctgtatcatcttccttttcttttctccattatattgtgcttcctcaagggatgaatgaagttgataaacaggtgattcttacccatgagaagactcatgttcggcaacatcattatatagacttgttcttgggagatattttctgtatcattcagtggttcaatccttttgcgtggttttataagcgcgatatgatagagaatcatgagtttttggcagatagggctgcaagccatgtgtcagggatggatgtttataaggatacacttacccgttattggctgtatggcagcatgaaaagtctggtgaatccttttgcatattccaccagactgatgcggctctccatgttgaaaaagccttcttcattaacggttcacaagtgttggttggtgtgtcttttgcctttgctggctctttatgcctgggcatttgccgaaccacgggatgttatatctgaggcggagcgggaggtaacggtgacgggaatagttactgatgaagaaggcaatcatgtgattgctgcatctgtactttgcccggaaaaaggcataggaacgatcagtgatgcagatggccgttatgtagtgacgattggaaagaatgacacgatccatattcagatgtctggataccaaagccgaaaggtctgcatcggcaatcgtgaaataaaggattgtaaaaccactataaatgtacagttaaatcattaaaataataatattttttgcaaacaaaattttgaacactatgagagcatacctgattctttttctatgtttgagttgttatcttgatatttcagctcagaagccaatcgtcattaatctggcacgtactatcggcaagtctccaaaagaaatgatgttgagtgaactggcagccgatattaagtacattccacttgaaacgactgatgattgcttgataaacaatgagttttacatcatgcaatatacaggtgaggacattataacaagcggtatcttccatttcaataaagaaggaaaatttctgaataggataggaagaaaagggcaggggcctgaggaatatttgcaaggattatttgcttttggtgactggaagaacaagctgttgtatgtgcagaactggacctcaatgacctgctacacttttgacggaaagtttgtgcgaagtgtccctgcacctaagcagaatatgggggcggcggggctgtttgatgaaaatcatctcctgtatagcaatgatatgtatttcgctgataaacaaaatcctgtccaactttatttgatagatagccggaccgggaagacggctggtaagtggcgcgggcttttggaggataataagaagtatggtttgattctgacttctcgggatttcatgtatcattatgccggccagttatactttaaaccagcattggagaatgtaatatataaaatggtatctcccaaaaagcgtcaactggcatataagtttgattgttcggggaaggacatcgacgtttcggttaacgaagctgatccgaataagagatttcaattcttgtccgtttattgggtgaaagagactgataaatatctgtttgtcaattatggtatgagagaaatctcgcggttaggaatatatgataaggcgaaaggaacctttactaatatagtgataaaagataatttagcgggtggctatgacattcatccggcgtggacgagcgatgacaaacatttgatcatgacttattttcccatagggatattgaaggagaaacgttgttcggaaagtttactgcctgagaggaaaaaggagttggatgaattggcaaaaaatataaaggaggatgataatcctgtggtggttgcagttacgctgaagtaatatgtgtgtttatactggagaaagattacttctctttccccagtgtaaacacgaattccagtccaccgctttgactgcttttggcggagatattgccgccatgaataatcacggcattttttacgatagccagccccaaaccggtaccgcccagtttgcgtgagcgacctttatctacccggtagaaacgctcgaataaacggttcaggtgttcggccggtacgcctacgcccgtatcggagaaactgaaatagtagaagttctcgtcctcacggaaacagttgatgttgatttgaatattcgttccggcgtaagcaatcgcattatccattaaattgcggaaaatggagtagagtagggagtaattacccttgatctgtattcccttctttaatgagtcgacgatagtgatatgtttttcttccaattccaaagcaacttcgttgatgatgttacctaccaatacactgatgtccacccgttccatgtcgatcatgttggcggcttcgtccatgcgcgtcaatacagatatgtcacgcaacagccggctcagacgattactttgtgcataacaacgttcaaggaaagtgttcattttctcccgtgaaatattatcattgttgacgattgtttccagatacccttggatactgctgacaggtgttttcaattcgtgggcaatgttctgcgtcagttggcgtttcaggcgcacctgttcttcttcctgagtgacatcgttgatagaaatctcgaaactggcatcttggaagataatacattctacgataaatgtacgtccgttcttattaatagtaatagacatccgcttctcatctttactgagcgaacgttgttgctggttcttgtttataaaatggataatctctttcagctcactgattgcaaagacctcttccgtcgtttccaggttagagtcggaaatcagattgctgtattgggtaaagagattgttgaccagaatctcttttttgtctttcgtgaatatccctagtccctcgtgcgaaatctgaagatgggtaatcagtttttcacgttcgatatagagtgcttctttcgtttcgtgcagacgtttgtagatctgaatgatatgctgtgaaatttctcccagttcgttgtgcggaaaggctgactgcatcgccatttcgataggctcattccggtcggcacgcatggcaaactcgcggagttggctgatcgaagttcccagcttattggtgaatttatagaaaataatcatcagcaataaagaaacaatcacggtgaaccacaggtaatgcgggtctgctttcaggttattgattaagctgacattatacggcaacgccgaccggacaatataatccccgtaacgtgtggcggagtaaaaataaggaagtccggtggtttcggaagtacggcgtacatcgaatccgtttccttctttcaaggctctctgcacttcgggacggtcgcggtggttttcgtgttttatttcttgcgtcttataactgtcataaatgacatttccctgcaaatcaatcagcgtcacacgcaaatccttcaatgcatggtcacggatatatttgtcggtagtttcttcgatagctggactatcgttcagttgttcgtacagccggctgttatagtcttgtaactgtgtattcagcagttcgactttatattccctttcccgttggtactgataggcgatgaaacagatcgcgaataccaggaacaacgaaatgaccgaaagaaagagtttccggctgaaagagaggaaatgtttttgattgacaggtaggttcataatcaataattattctgcttcgaaacagtatccgtatccgaggcgggtgacaatgcatttgccgtattcgcctatctttttccgcaagcgggtgatatttacgtcgatagtacggtcgagcacgtaaacttcatcgctccagatgcgggtgaggatatcttcgcgtgaaaatacacgtcctttgttctgtaccaatagaagcaatatttcaaattcttttttagtaagctgcacttcttcgccgtcgatactaacctttttcttggtaatatcaatgaccaatgactgatagacgagccgttcgggggctctttccgtttccgctgttgcggtacgccggagtacggccttcacacgtgcgatcacttcacgcagggagaaaggcttggaaatataatcatccgctcccaggttaaagcctgtgaccgtatcgttttccgtatctttggctgtgataaagataatgggcactttagctgttttcttgtcttttttcaacatattcgccattttgaagccggagatttctcccatcattacatcgaggagaatcaggtgataactgctgatgtccatttttagcgcttcttcggcagaattggcggtatccacttcataaccttcgttttcaagattgaatttcagaatctcacagaggtcttcttcatcgtcgacaactaaaatacgggtttcgttcataagatatatgtattaatgtgatatgacaaagttagtcttttttttatttcgggacaaagatgaggagactttgttacgggcggatgaaacaaatattacaatcgtattacattcggcggaatacggctgttcggacgaaatttaatagtttttattggccgggggaggaaaaaacgtttgttatttgttatctttgttagagaaatagaatagcaatagattaaaatacaacttgcaagcaatgataaaatttgacttgaaaaatcacaggcgcgaagtggtaggggcgatcatcgtccttttccttctgataggagggatttccgtttttaaatacacctctttcaattccggtttcgagattgttgatgatctgggagggaatatctttccttccgccatactgtcggtagccaccacggatgcgcaagtaatcacgccttcggactctatgtatctgggaaatccgaagtcatgtattgccgtgcgggtgaaatcaagaaccgcttatagccgtgtgcgtatcgaggtggcggagacgcctttcttctcccgttccgtgtcggagttcgttctcaataaaccgcggactgagtataccatttatcctgatataatctggaattatgaagcattgaaaaataatgttcaagccgagccggtcagcgtagccgtgaaggtggaaatgaacggagacgacttaggccagcgggtgcgtactttttcagtacgcagcatcaacgagtgtctgttgggatatgtggcaaacggaacaaaattttatgataccagtatcttctttgccgcctatgtcaatgaagaaaatcctatgattgaccaattgcttcgcgaagcgttgaatacccgtatcgtgaatcgttttctgggataccagagtcaggcgaaaggtgtggtagacaagcaagtctatgctctttggaacatcttgcagaaacgcaaattccgttacagttcggtttccaataccagcctgtcgagcaatgttgttttctcgcaacgggtccgcacgtttgatgatgcactggactcttcacaaatcaactgtgtggacggtagtgtgttgtttgcgtcgttgcttcgttctatcaatatagacccgattctggtacgtactccgggacacatgttcgtggggtattataccgacaactcccataaagacatgaacttccttgaaacaacaatgattggggatgttgacttggatgatttcttccccgacgagcaactggattccaccatggtaggtaaatcacagaacgaaatgtctctgctcaccttcgagaaatccaaacaatatgccaacaagaagtacaaagagaacgaagaaggtatccattccggaaagctgaattatatgtttttggagatttccaaagaagtacgcaggaaaatacaaccgatagggaagtagtgaacactttttttcgtatttttgcccgagtaatcattttaatgaaaaaggatgcaaggcaagaaatttatctctcccggagcatggttttctatgaactatccgtcggactggaatgagtttgaagacggcgaaggctcttttcttttctataatcccgatgtatggacgggaaactttcgtatatctgcatttaaaggcaatgctacttacggcagggatgccgttcggcaggaactgaaagagaatgaatcggcttcattggtgaaggtcggggcattggagagtgcatatagcaaggaaatgtttcaggaggaaggaaactactatacttctcacctgtggattaccggtatcggcaatatcgctttcgaatgttcgtttaccgttcccaaaggcggaagtgtgaaggaagcagaggaggttatcgccactctggagattcgcaaggagggtgagaaatatccggcggaacttattcctgtccgtctctccgagatttatcagattaatgaaagctacgagtgggtggtatctaccgtgaaagaggaactgaagaaagattttcagggagtggaagacgacttggagaaacttcagcaggtgattgacagtggcaagataggaccgaagaaaaaggacgaatggctggcaatcggcataacggtatgcaccattctggccaacgaagtggaaggcatggaatggaagactttgattgacggcaaccgtgaagctcctgtacttgactacaaggaccggattatcgacccgatgaagatagcttggagcaaagtaaaagcagggcagccttgcaatgttattgaagaatataaatccgtgattattaatcactaaccactacctaactaattactaaactacgtggcagtaccttatttacaagtagacaacctgaccaagtccttcggtgacttggttctttttgaaaatatatcttttggcattgccgaaggccagcgtgtgggactgatcgccaagaacggtaccggaaaaacaaccttgttgaatgtcatcgcaggcaaagaaggatatgataacggaaatatagttttccgtcgtgaccttcgtgtcgattatctggagcaagacccgcaatatcctgaagaattgaccgtccttgaggcttgttttcatcacggcaacagtaccgtggaactgataaaggagtacgaacgttgtatggaaaccgatggacatcccggactggatgagcttttggtgcgtatggaccaggaggaggcatgggaatatgaacagaaagccaagcaaatcctttcccaactcaaaatccgtaacttcgaccagaaagtgaagcagctctccggcggacagttgaaacgtgtcgccttggctaacgccctgattaccgaaccggacttgttgattcttgatgagcctaccaaccaccttgatctggatatgaccgaatggctcgaagaatatctccgccgtaccaatctcagcttgctcatggtgacgcacgaccgttatttcctcgaccgtgtctgctcggagattatcgaaatagacaatcggcagctttatcaatataaagggaattatagctattacctcgaaaaacgtcaggaacgcatcgacgcaaaaagtgtggagatagaacgtgccaataacctctatcgtaccgaacttgactggatgcgccggatgccgcaggcacgcggacataaggcccgttatcgggaagatgctttctacgaacttgaaaaggtggcgaagcaacatatccgcaatgataatgtgaaactggaagtaaaagcctcttatatcggcagcaagatattcgaagccgatcatctttataagagtttcggtgacttgaagattctggatgatttctcttatatttttgcccgttatgagaaaatgggaattgtaggcaacaacggaacgggaaagtctacatttatcaagatactcatggggcaggtacagcctgatagcggtacggtggatatcggcgaaacggttcgtttcggttattattcgcaggacggtctccagtttgacgaacagatgaaggtgattgatgtggtacaggatattgccgaggtcatagaactgggcaacggcaagaaactgacggcatcccaattccttcaacatttcctgtttactcccgaaacgcagcatagctacgtttataaattgagtggaggtgaacgtcgccgtctgtatctctgcacggttctgatgcgtaatcccaactttctggtgcttgacgagcctaccaacgacctggatattataactttgaacgtgctcgaagaatatcttcagaacttcaaaggttgtgtcattgtggtgtcacacgaccgttactttatggataaggtagtggatcatttaatggtattcaacggacagggagatatccgtgactttcccggaaattacagtgattaccgagattggaaagatgcgaaagcgcaacaggaaaaagaggctgagaaaccgcaggaggagaagacggcccgtgtccgtctgaatgataagcggaagatgagcttcaaagaaaaacgtgagtttgaacaactggaaaaagaaatagccgaactggaaacggagaaggcgcagattgaagaacagctgtgcagcggtacgctctctgtggacgaactgaccgagaagtcaaaacgattgccggaagtgaatgacctgattgatgaaaagactatgcgctggttggaactcagcgaaatagaaggttgaattccgaataacaataaacccgaaaattctgataaccagatacccctgataacataaacctttatgacaaacctgaccaattatcatagtcattgcctgtattgcgacggacgggctaatatggaagattttatccgctttgctatcagcgaaggctttacttcctatggcatttcttcccatgccccgttgccgttctctactgcatggacaatggaatgggatcggatggatgattacctttctgaattctcccgtctcaaagaaaagtatgctgataaaatagaattggcaatcggccttgaaatagattatctggatgaggacagcaatccttctttgcctcgttttcaggatttaccgcttgattaccggatcggttcggtacacatgctgtattctccggagcgggaaatcgtggatattgatactccggcagatactttccgtcaattaatagacaagcatttcgatggtgacttggattatgtggttcacctttattataagaatctgcttcgtatggtagaattagggggatttgatattgtaggtcatgcggataagatgcactacaatgcttcctgctatcgtccggggttattggatgaaccgtggtatgatacattggttcgcggatacttcacggccattgccgaacacggctatattgtagaaatcaataccaaggcttatcatgaactgggaacattctatcctaatgaacgatatttcactttcttgaaagaattaggtgttcgggtgcaggtcaatagtgatgctcactatccggaaaggataaataatgctcgtgccgaagctctggctgctttgaagaaggcaggtttcacttcggtagtagagtggcatgatagaaaatgggaggacacgggaatatcagttcctcggtgaccggttatttatttgtaagttggagtgcaaaagattcgtgagacacgatttctttcttttttatatgaatgatataagtgcctggttctgagatagcaatcggattatcattgtctattagtaaattggtaggatgataaacacttgcgtaacatagatcattgatgacagccgcttgtgcttttttgtcattgcggatgatatgaacggagcgactgtcgaaatcgcgcactttttgttgtgtggtggctggaagtgtcagatatacataagatgcaggtgcatctttacggtgttttaagtaaactgagaataatttactttttagaatttcgggtttgtacattcccataaagtctttccattgtccttctttattctcggtcagagtgatgcaagtgtccgcctgcaagatgatatatccagtattatcatggaaaatccgtttattgtcatcagaccatactttgcctttgctgaaccgttggtcaatagatgtcataatagtggctgtgctgtcagcatggatgttgcttcccatacataatacatagttatccgtaaatatccaggttttattcgcctccagtttgttacgtttcagctgcatggcagtaattccggtattttggtaagtcgttcctcctacataggaactgtgatttcgtgcatctgttttattgggattaggaataggcgcattgctttcataagtagtaatccccgggattcttctccaattccaaaaaggaaaaatgttatggtattcatctccatgcacatacgtatacaatgcaccgtcggccatgtaatatcctttcaggttatcctcgttcaccagttccgtgccgattactcgttcggaagccatacgtacggaagccagccaggtaggagtacggtgaacggtatagtccgactcccgaaaatgtttgtttccggtgaatgagttggggacttgtgaaaaagaagaatttcgaagaatcattttctttatttgatcggcaacttccggttcgctgcttttcattaatgaatgtgcggcaaagagtaaactaaatcctttgtcaatatctgcgttgcggaatagttggcggttaagcgcatttacatcccaatatcccctccagataatccattggtaaccttctagtagcagggaggtgagaattctttgttgttcctgtgaaaaagcaagggtagtgccggtaaatagttccgaatagaaactcatattgcatataaaagacaggccgtaattgccaaactgttgttggggcccgtgctggtgaaaactccagtctgctttgattccttctttttgtccgagagttatttcagaggcaataactttccgtgcttcttttgccagttgccagtcattctgcaataaagctctgattagtacattacctgccagccaaactttgttctgtcctgtcatgccgaaggatgaattcatcattactttgattgcgccttgtttttccggttcgctcatttcttgttcgaacaataggaatgcgggcccgagtgtacgtggaatgccgatttgattataccaccaatttttgcataccagttttctactgaaccagaaattcattgcttgatgaatggcgttagtcagtcgggctctttcagacggtttaagtatctgctttttctggtaatggtatttagtgagtttcaatatccgttcggtatgttttttcggttcccacccggaacgtttcgtatctgcgtagttgatatcttcccatgaaccgtccgtatggagagtatttattaaatgtttgatttctttaggggagataggatatagttgttgtaactcaattacattctggtccgaagcttccttctctggagggattgttgataattgcctaagaagcacctccttacctttatctttgccgacagtggcatttatatagtttcttttgattaaggcgactgagtcattgaacgcttcttgtgcatcgagcgttgcatagcttaatagacaaagaagtaacgagagataaaggtaagagagtgtgattttcatattttctattctagactgttttcggattgcttttctgtattttatttattctgtccgtttgcaggcattcgccaggaaaaactcattcaatgcatcttcgtaatttccgtgaatcagaatatgatgattgcccaatggattcttcaggaaatactcggcgggagtattcatacggatacgtacctgtgtacggcacatattgatataattcgtgttttcggataatgttcccgtggacaagtaatattcatccagacattcgccgccacatttaataatagtcacgtctcctgttggaagtaagccttggatagcaatacctttttctgtctcgaagtggttgcggataatgtatctttccgtttgtttaaggcctatggtacagtgagccaatataagctcgttggtgcgggaattaatcatggaaggattcgccatgaatccgtcttttccggttaatgacttcacggccagcaaagtaaatatcgactgaagatccccttcacaacctgccattatgccatcgtcattcagcaaagataatgccagacaaccggtagtgtcgatttgctcaatcagtttgaaacaactgagtgtcaacgcctccaacttttcttcttcgcatactttcttaatagcccgatataatcgcatcgctttgattaaatcttcgggagttccttcacggcaagcaagagcttgtgaagcaacggcggcacaggaagcacctacctgttcatctgtgatttgttgaaaatgttcataaattcgttccaatggaatgtctatgtattcgataccccaacggcgttttgccagaagatagtcaacattgctggcgaccaaccaggatgaaggtgttccgataactccgatgcgtttgccgaataaagaacgttgtgcccggaaattattatagagtatatgtacacgttgtatgattgccggtaattcaccgtgaagaatttcgcttttcattcctcttccgcgtaaccatgtagatatctccagagcggctgcaagtgagttttgcataccgtcggccagtaaaatggcagggcggggaagtcgttcgaaatgttggatgaccagtctttctactccgccggtagcgataaaaataatcttgaaatcatcactcgtcaacttgtccatatcctgataatcgacaagcttgacagtataatatttttcgagttcgcttaaaatcgcttcatgcgaactgcgcagcgtggcttgtttatgaagtagtgacgcaaatgagataaggtgtatggtcattatgatattgttttaagttttccgtatgacaaatgtatagctttattttcaaaatcccataacgtttttaaccttgctaaggtttttaaagtttttatgtctctgtattcaaattattgcgtacatttgcagctccaagtagataaagtaaatagtaattaagtaatttgtagttaaaattatgccaaccatatccattcgcggaaacgagatgcctgcatctcctatcagaaaactggctcctttggcagacgctgccaagcaacgcggagttcatgtatttcacctgaacatcggacagcctgacctgcccacgcctcaggtcgcgattgacgcgatacgcaacattgatcgcaaagtgctggagtacagtcccagcgcaggttatcgtagctatcgcgagaaattagtaggatattatgcaaagttcaatatcaatcttacagcagatgatataatcattacgtcgggtggttcggaggcggtgcttttctctttcctttcctgtctgaatcccggggatgaaattattgttccggaaccggcttatgccaactatatggcatttgctatctctgccggagcgaagatccgcactatcgccacgactatcgaagagggtttctcacttccgaaagtggagaaatttgaagaactgataaatgaacgtaccaaagctatcctgatttgtaatccgaacaatccgaccggttatctgtatacccgtcgtgagatgaatcagattcgtgacttggtgaagaaatacgatttattccttttctccgatgaagtatatcgcgaatttatctataccggttcgccctatatttctgcctgccatttggaaggcatcgagaataatgtggttctgattgactccgtttcgaaacgttattcggaatgtggaatccgtatcggtgcgctgattaccaagaacaaagagatacgtgacgctgttatgaagttctgtcaggctcgtttgagtccccctttgatcggacagattgctgccgaggcttcattggatgctccggaagaatattcacgtgagacctatgatgaatatgtggaacgtcgtaaatgcctcattgacggattgaaccgcattccgggtgtttattctccgattcctatgggagctttctacacggtggcgaaacttccggtagatgattcggataagttctgtgcctggtgtctttcggacttcgagtacgaagggcagacagtctttatggctccggcttccggtttctataccactccgggctccggtatcaacgaggttcgtattgcttatgtattgaaaaaagaagacttgacccgtgcgctttttgtcttgcaaaaggctttggaggcgtatccgggaagaacggaataaaagatgtctctatcacttttcatagcccggcgtatctatcgtgaaagcgatggcggaaagcaggtatcacgtcctgcggtcctcattgctatggcgggtattgctatcggactggctgtaatgattatagcggtagcggtagtgatcgggtttaaaagtgaagtgagaaataaggtcattggatttggctcgcatatccagataacgaatctggatgcggtcaattcttatgagacacatccgattgttgctggcgatagtttgattgccgccctttccgattatcctgaagtgagtcatgtacaacgttattccaccaaaccgggaatgataaaaacagacgacgcctttcagggaatggtgctgaagggtgttggaccggaatttgattcccgctttatgaaggaatatctggtcgaaggagaaattcccgttttcagtgattctgtatcttccaatcaggtgcttatttccaaggctttggctactaagatgaagttgaagctaggagataaaatttatacctattatatacaagatgaggttcgtgcccgtcgtttgacgattgccggaatctatcagactaacttctccgagtatgataatctttttttattgactgatctcaatctggtgaaccgcttgaacggttggcagcgggagcaggtgagcggagtggaattgcaggttcgtgattatgataagttggaagacgtaacttatgaaatcgctattgataccgatagtcagcgggataagtttggaggcatatattatgtacggaatattgaacaactgaatccccagatatttgaatggcttggcttattggatatgaatgtatgggtgattttgttcttaatgataggggttgccggatttaccatgatttccggtctattgattattatcattgaacgtactaatatgataggaatcctgaaagcgttgggagctgacaatttcactattcgtaagacgtttctttggttctctgtttttcttatcggaaaaggaatgctttggggaaacgtgatcggtctggcattctactttattcaatctcaattcggaattctcaaactcgacccggaaagttattatgtcgatacagtatcggtctctttcaatatctggctttttcttttgattaatatcggtacattgttgtcgtcggtgctgatgttgatcggtccttctttcctgataacgaaaatcaatccggcaaactctatgcgatatgagtaagtcttccttccggatataagtaaacaggtttattatcttctcataaaatcacctttccctcggaaaaggcggcatagcttgaaattaagagattgtatcggttggagaatatcgaatatgggcaatgagaaataatattttctgcctccccccatttctttggctgtccggttaatcacaatagcttgcgttatgtaacgaagcagccatatcaataatgcaatacctgctaccagccaatgaaagttgagtatgccgaatacgatacctgccatacaagcgacatagaataacaggcgggaaaatgtttcgaatcccgacaggtaacgttgtgctccacggtagaagcgtgcggtagccatataactaactttttcttccttccagtctttgtagcggtagacgggctgtatacgcatcgtagcgttgaagtcagtttctacgcgcgtattcgttttggttactatttgattaatgaacaagtcatcttctccgcgttgcaggttcagatatttggaatatcctttttgtttgaagaataattctttacggtaagccatgttacgaccgatacccatataggggtttccggccaaggcgaaccccagataacgtaaagactgaaataatgtatcgaatgcgatacgtttgtgtaaccagcctttgatacggtcgtatccgctgtaccccaatacgatttgcgtttgcgaagtgaagttgcgcgccataagtttcagccattggttacttgcaggcatacagttggtttccgtaaatacaagccagtcgtgcttgctggctttgatacctaatgtcagagctagtttcttgtggctgatatagcgggcgctgtccggtgtaaaactatggtagagatgaggatatttttcttccatgtatcccagcacatcttctgtttcatcagtggaagcgtcattgataacaatgacttcgaactgcgggtaatcttgttccagaatagcaggcagaattttacgcaggttatcagcttcattgcgtgcacaaagaatgacggaaagtggaggcaattcccgtgagaagtgggtttcctctttgcgtacagtcttattacgaacgtgtatccgattgtacaaaccgaaatagtaaataagctgaatgataaaaagaatacctgccgccgataaaagaatcagttcggcagtattgaatgtaaatgcttccattgaatttaagtgtcgtttttacgcccgcaaaagtacgcattttttcgatagttccctcatcttgaaggaaggttatttcgcaaatccagatattctttcttgaacatattcacgaaaaggaagaatagcgagagtaataacggaccgaagatgacccccataaatccgaataacggcaaaccgatgacaactccgaaaatagtgatgagcggatgtgtgtccgccattttcttttgaaggataaatcggatcaggttgtcggattgtgacacgacgatggctccgtatgcagcgagcccgattgcatggaaccagtctccgctaatagccagataagcggctacgggaaaccataccaatgctgtacctaccattggaataatagttgcgaagcaggtgaggaaacctaataatagtatattgggtgctccgaaaataagatagcctatcatggcgacgcctccctgaatgatagccagcagaggaatgccgatagcattggaacgtacaatcatgttaatctcacgaatgacttcctgcgtatttgcctcattaaaaggaagaatgtcgttgacgtatgcttccattttttttcctcctatcagcataaagtaaagcacgaatatcatgacgaatagattgactgcaaggctgctagcgccttccataattatctgtccgacacgagggaggatagatacgatgaatgatagcgtatcttttcccaatacatcataaccggtcttttctttaataaattctgctacttgctgaatgggttcgataaaggtttgcggagccagatttatatcctgaagtttgtttaccaccagccagattgttaatcccagcggaacaagaaacaccataatggtttctgccgtaatcagtaatgcactgatgttgcgtttcattttccgcttttctgtcagatgattcatgtgtgtgcgtacaagtatatacatagttaatgctcccagtaatcctcccaaaaaaggagtgatttgccggaagatgataactcccataaatagaataatgacaatgagggaatatttccagtattgttctttgatgctcatatcgtgcgattcgttcgtttatataataataaacacgaaaagcaccggaaaggtttgttttataatggcatatcaatatgaaaaattgttttgccgggattgctttcctgaatggtgagatgcccgtcgtgaaggcggataatttgtttgcataggcttaatccgataccgctgccttctgatttggtggtaaaaaaaggaataaatatcttttcctgtaattcaggcggaatacccgggccgttgtccgcaatgtcaatagatatgtgttcgtcttgtagtgcatggatgctgattctgcctttttcttttccttccagtgcttgcatggagtttttcagaaggttgagcaggacttgggagagttggttctcgtcacctttcatataaatcgttttaggttcgcaggtcagtgtgaagatgatattgctttctttgaagtcgccggataagagttcccggagattttgcagggttgccgtaagtgagaaaagtttcttttcgggttttggcaggtaggagaggtgacggaaggattcggtaaattgcaataaacgttcgctttgtgcttgaatgatgcgaagtccgcgaactgctttttcgttgatgtccggataggtggacagtgtttgtgacagggagataatgggagcaatggtgttcattatttcatgagtgagcacgtggcttagtttgttccacgattcactttctttgtcgctaagttcgtcaccgatatccttgatagataagagagttattgttttatcttgtagtttcatccggctttgtgaaagactgagatgctcctttttgcctttttcttgcagtaaggattctagttgtcggtatcgggttaattgctggcagtctaataaggaaagggcagtgctgtttgctatgattatttttccggtagaatcccatgctaataccccgctgggcacttcttccaagagtgagcggtagaagtgttcctgtttggaatattctgattgagttttggcgagcaggaaattgatgcggttgagagagcgattcagtttttcctgttctttactaacgttttgttcgggaaagtaaagcatattatccttgtcttctatggcatcgaaaaagacacgcaacttttggttgaatgaatttagtttatttaccagcctgctgatttggaagagggaacaggtaattagtaatgtgcctattacaaatccgcgttgtgagatgataagccagacgcctgttcccgaggtgacgaggataagcatgacgtgtagtagtataacccaatagatgtgtcggctgaatatcatgctgttcagggtttgaaacgttttagtttgttatagagtgtctgacggctgattcctaattgttcggcggcggcagtcaggttgccattattttgcagaatggctgtttcaatggcttgcctttccacttcttccaaattggggacagtgctggtggtttgcggcttccaggtttgttttaccaaaatgtctttggggcgtatcacgttgccttcacacaagataacggctttctcgatagcgtgctgcagttcccggatattgcccggccagtggtaagagcgtagtttctctattgtttgctcatgcattcgcatttccgggcgttggtatttcgaagcgaaacggtggagaaaggtttcgacgaacaggagtatgtcgtttcctcgttctcgtaatggaggaatttcaaggtggatagtgttgatacggtagaataaatcttcgcggaataatccttgtttcaccatttccgggatgtctttattggtggcggaaatgagtcgtatatcaacggggacgactttattacttccaattcgggtgatattcctgttttgtagtacagtcagtaatttggcttgtagtgcaaggggaagatttccaatctcatccataaaaagcgaactgccgctggcagcttcgaattttcccggacggctttcgtaagcgtccgtaaaagctccgcgctcgtgaccgaaaagctcgctctcaaaaagggattcactgatagctcccatgtcgatacttgacatgggacgagtattgcgtgaagacaggcggtgtatttctctggccagcatttcctttccggtcccgttttctccggttatcagaatattggcgtcggtcctggctactttattgactacctttattaattgtagcatggcgggagaatgccctatcagcatttcaggtttgttcggattgccggatcctacgattgagttttttgattttgaggaacttttcctgttcgatttattattgtatgcttcctttattttctgaaccagtgtccggttatcccaaggtttgagaagaaagtcggtagctccgttcttcaaagcttttacggctagttccacatctccgtaagcagttaacattaccacagggagtgcggggcggatttcgtgaatatgtttcagccagtatagtccttcgttgccgttattgataccggccgaaaaattcatatcgagaattacgatatcaatggaagtggtagtgagcagtgttgttatttgattaggattggcagctgtgcggactgtactgaattcattttcgagtaaaagttccagcgaagccaacacacttttattatcatctactattaaaatagttccggtttccatatatgtaagattggggggatctgtctgggttgaacgattctttaagtttttgggtaaagatattcgtttttacttttccctgcaagagagtgtccaataattagacgttttatgatacatttcctgaaacatgactttattctatgtttcgtttaagtaatatttatagcctgaacgttgaataatggctgtttgcacgcaggtcatggtggctttttattgataacgtccaatttttagacgttatagtgtgtaataattggacgggaacgataaaataatgtatgtcatctgtcttgtaatcagtggtttaagtattgtggcattatgtttgcttttttaattcatatagaacacaattgcatatatactgaagaatgaggaacattttctttttattgtttttattgcccgtgattacgtatgctcaatctgcaatgagtttggatgaatgtatccgtttggcatggaaacagaatccttctatacggaatagtgccattaacataaaggaagcacgaacggattatgctgccgctatcggtacatttcttccccgcatagtagccaacgcagaaacaggaaagcgtttcgggcgttcgatagacccggataccaatggttatacagaaaagacttttgaagaaggaacgataggtcttgatatgactttgtctttgtttgaaggtttttcacgtatcaatcaggttcgttttcggaaaataaatcgggaacgcagcaagtgggaactgaaagacaggcagaatgaactcgcctatcaagtgacggatgcttactacaaactggttttggaaagaaaactcttgaatttggctttggagcaaagccggttgagcgaacgatacctgaaacaaaccgagacatttgtggaactgggcttgaaatccatttccgacttgcaagaggtaaaagcccgcagggaaggggatatatatcgttaccaatcccgtgctaatagctgtcggttgtcattactgcatctggaacagttgatgaactttcagtcgggtgatacacttgtcattcaggatacgattgtcgaattgaataaactcccgttgctttcactcccctctacggaaacattgtatagacaatcgttggaagtactccctgccatgcgtatgattagcttaaagcagaaagctgcccgcaaagaatatgcaatggcgggcggagctttttctccttctgtttatgcccgctttacggtaggttctaatttctacaacactgcattttccgccaggcaattgcgggataatataggaaaatatatcggtatcggtatctctttccctttgttgagcggttttgaacgttttacgaatcaaaggaagttgaaattgaacttgtatcgcctgaagaatgaagaggaattggagaagcaacagctatatactgaaattgagcaaactcttctttccctacgtgccggctatacggaacatcaacaggtattgcagcaattgagcgcggaaactctggtcttgaaagaatccgaacgaaagtgggaagaagggcttatctctgtctttcagttaatggaagcccgtaatcgttttatttccgccaaagcagaactggttcgtgtgcgcttgcaggtagaaatgatgatgaaactggagaaatattaccgggagggaactttcttataaaggcagagtttatatattttgaataacaaagttgatacttctttaataactaatttataataaccctatttttgattgattccttatggatacacctattgaacgtaaacccggcattacccgtaaacatctatatgtaataggtggtatagcctttgttattgccgttgttttatatttcatattcagagacactacctcttccatgactgtggagaaagaacgtctgacgattgctaccgttaaccgtggtgagtttaatgactatattcgtgtcattggtcaggtaatgcctaatcgtattatttatatggatgccgtggaaggtggacgtgtggaagaacgtctaaaagaagaaggtgctatggtgaaggcaggcgacgtgattttgcgtctcagtaatccgttactaaatattggtattatgcagagcgaagcggatctggcttatcaggagaatgaacttcgtaatacccgtattagcatggagcaggaacgcttgcgtttaaaacaagagcgtattgggctaaataaagatcggctggtgaaacagcgccgttatgagcaatacagtcgcctgataaaagagcaacttattgcagaagaagattatcgacttgccaaagaggagtatgatgcggctaaagaacagttggatgtcattgacgagcgtattcgtcaggataatattttccgtgaaagtcaggtaaacagcttggacgagaacatacgtaatatgaaacagagtctcgcgctggtacgcgaacgaattgagaacctgaaggtgaaagctcctattgacgggcaggtaggtaatcttgatgcacagataggacaatcaatagctgcgggcgagcacattggtcagatcatcacttctgacctgaaagtacaagcgcagattgacgaacattacgtggagcgtgttgtacccggattgccggctgactttacccgtgacggtgtcagttataaactggaggtgacgaagccgtatccggaagtaaaagaagggcagtttcgtaccgatttgcagtttacagccggacgaccggagaatatacgtgcagggcagacctatcatatcaatctacaattgggcgaccctgcacaggctattttggtgccgcgtggcggatttttccaaataagcggtggacgatggatgtatgttgtggatgaaagtggtaaatttgctattcgtcagcctatccgcatcggacgacaaaatccgcagtattatgaggttaccgaaggattaaaacctggtgatcgggtgattgtatccggatatgaactgtttggcgataacgagaaactgatactgaaataagtctatgatatgataaattacttttcacaagtgatacgtagtcagcgggttaaaaaatctctgacactgataaatataacgggattgtctgtttgtattgcaacagcattgcttatcatactttacgtatggtcggagttaagctacgattcattccacaataccgagcgtgtatatcgtgttgaaagccggttgtatgaaggcaagacgctgacagataactgggcgactacagcttacggccatgcacctgcaatggctcgtgaaattgcaggcattgagaagtatgtccgtgtaacagcacaagaccgcgaacaagtggtgaattacttcgacaggagatttgccgaagcacattattgctacaccgaacctgctttttttgagatatttaatttcccgataattagaggagataagaccgggcaactggtgcgtcctaatacggtggtactgaccgaaagtgcggcaaatcgttattttgatgaagaagacccgatagggaaggtgctgactttcagtacgccttcatcgcagcaaaactttgaagttaccggcgtgatagcagatatgcctgttcgttctcatctgcaatatgattttctactttcatatagtacgattcccaaagagcgacaggacatttggtacattcacggagtttatacctatgtccgcctgatgtccggaaaatgtccggaagagattgaagaggcttttctcaatatatccgataagtacaaaactgatgccttgagacataagacttgggcggtagaactgataccgctgaaagacattcatctcactccacaaaaagcttatgagaaagaagtgaaagggagtcggactgcggttcttatactattggtgatgtccgttgccctgctactgataggttgggctaatgccttgaatctgaccgtggcacgtttcttggaacgcggacgtgagttcgggttgcgtaaggcttttggtgcttcgcgccgtcagattattatccagggacttcttgaatcaggtttcatgaatctgttggctacgctgatagctcttggttggctggaacttcttttaccccttgtttatcgctgggcagggcaaagctttgggacggatatacttatgttgcctgctttctggggaattgtagccggagtggttgttattggtacgtttgttgtaggcttctatccttcttggctgatggttactatacgtccgtcggaaattatgagggggaaactgttacacggtaaacgtggtaaccggataaggaaagtgctgattgtggttcagtttctcgcttcttttgttctgattactggcacgttcacagtgattcggcaagtgtgttatatgcaaagtgaggcttccgtcgattctcattcacgtatgttagtcattaagtacccctctttcaccgagggattggcactacgtctggaaagtttcaccaagcgtctgaagcaacgggcagatgtaagccacgtaaccgtttcaggagctgttcccggggtggaggtagccaattattttaccaatcgtccttatggaagtgacccttcgcaagtgaaactgatacagatgtttgccgtagattatgattatctatctgcctatatgcccgctatgatttgtgggcggtacttctctgaggactttggcggtgacctcaaccggatagtgctcaacgaggaagcagtcaggttattaggttatgagtcgcccgaagccgcattgggacagcaggttaaaatggaggtggtaggcgaaccgctcgaaattatcggagtggtgaaaaactatcaccagcaatcgctttccgtggcttacaaacctattatcttctttatgaaagagcgagtaccatttattgcaacaccttatatttcagtccgcttgacaggcgaaggagaagatagtgctttgatggagatcgagcagatgtatcatgaatattttccgacttctttattttcttatttctttttgagtgatttgaatactttcctttataaatcagaccgtaatttcggttggatatttgccagtgcttctttaattgccatatttgtggcatgtctcggtttgtggattgtaacattgttttcaaccttatcgcgcttgaaagaagtgggtatccgcaaggtgctcggtgcaaataaaagcagcctgttttttatcttgaccaaggagctgatgttgctcactatattggcatctgcaatcggtatacccgtatcagcagtgttaatgaatggctggttggagacgtatgctttccatatttcgctaccttggtggatatatgcagtcgtttttgcgctgttgatgctgattgcgttccttactgtttttcaacaagtgtggcgcattatctgcttgaaaccgatgagtattttaaaatatgaataactaataaatattgaactgattatgattaagactgaaaaactgacaaaactcttcgcaaccgaagaagtgcagacaaaggcattgaacgaagtcactttacaagtggaacaaggggagtttgttgctataatgggtccttcgggatgcggtaagtcaacactgctgaatattttgggtacactcgattctccaacttccggctcttatttctttgaaggaaaacaggtggataaaatgaatgagaaccaattgactgccctcaggaaaggtaatctcggctttatctttcagagtttcaacttgattgacgagctgaccgtatgtgagaatgtagaattaccccttatctatataggcgtcaaagccaatgaacgtaaagaaagagtaaagaaagtactcgagaaagtaaacctgctgcatcgtgccaaccattatccacagcaattgtccggtggacagcaacagcgcgtagctattgctcgtgccgtagtgacggactgtaaattgcttctcgctgacgaacctaccggaaatttggattcggtgaacggtatagaagtaatggaactattgagtgaactgaatgctcagggaactactatcatcatcgttacccactctcaacgggatgcaatgtacgcacaccgcgtcattcaattattagacggacaaatcgtagccgaaaacgtcaaccgcccgctgggaaaaaatgtgtcagctaaaaatgaaactgtatgataggaaattactggaatagtgcttggcggaatctgatgaaacggaaaaggttcagtttcattaatatattcggactggcgattggtatggcatcggcactgctgattcttacctacgtgacttttgaattcagctttgataaaatgcacacaaagtatgaccatatctaccgtgtgcaaagtacgtttcacgaaggggaagtactgaccgactactgggcaagcagctccttcggatatggttcggcaatgaaagagaaccttgccggaatagaggattatacccgaatcggctccctactccagccggaacaaatagtgaaatacggtgaactgaccttgcgggagaatcagatagcgtatgccgaacccagcttttttcgcctttttgatttcgaacttttgaaaggcgataagaaaacctgtctctccatgccggggcaagtggtaatcaccgaacgcattgccagtaaatatttcaaggacgaagaccctatcgggaagatattcatctttaccggcgcatacgacaagatatcgtgtgaagtgaccggagtgatgaaagaaatgccttccaactcgcatatacattatagttttctgatttcgtataaatctctgcctaaatatatgcaggaatattggtacaaacacgaggcttatacctacgtcctgcttgactctcccgaaaggaaagcggaaatagagagagaatttcctgtaatggcggaaaagtacaagacggatgaagccttgaaaaacaagacatggggagtctctttaatccctctggcagatatacacctcactccgcaggtaggatacgaagcggagacgaaaggaaaccgttcttctatgattgccttgatttttgctgctattgctattttggctattgcctggataaactatataaacctcaccgtagcccgttcaatggagcgtgccaaagaagtgggagttaggcgggtagtgggagctttccgcaagcagttgattcatcaatttttgtttgaagcattagtgatgaacctgatagcttttgtactcgccgttggcttgatagaattggttcttccgtactttaatcaattggtaggccgtaccgttaccttctccgtttggctgatagattattggtggattttattgattcttgtttttatcgtcgggatattcctttctggatattatccggcattggctttgctgaatcggaaaccaattatgttgttgaaggggaaattcttgcatagtaaatccggagaacggacacggaaagttttggttatcattcaatatatggcttcaatgatattgttgtgcggcacattgattgtctttgcacagttgagttttatgcgcagccagtctttgggagttaagaccaatcagacattggtggtcaaatttcctgggcataccgagggactgaatacgaaactggaagctatgaaaaaaacgatagcacgtcttccgttggtatatcaagtcactttctccggcgctgtgccgggcgaggaagtagcgactttcctttccaatcgccgtaccaatgatgctctgaagcagaatcgcctgtatgagatgcttgcctgcgaccccgattatgtggatgcctatggattgcaagttgtggccggaagaaatttctcggaagactatggagatgatgtagacaaactggtgattaacgaaacggctgtacgtaacctgggctttacatctaatgatgaggctataggggagttggtgaacgttgaatgtactgatgccccgatgcagattatcggagtagtgaaagattatcaccaacaggcattgagcaagaattatacacctatcatgttgattcataaagataagattgcctggttaccacaacgttatatctctatcgtaatgacttccggtgatcctcgtgaattggtatcacaggtgcatgagatttggaatcaatattttgcggattccagtttcgattactttttcctcgaccaattcttcgaccaccagtatcgtcaggatgaggtgtttggtgtaatgattggcgcttttaccggtttggctattttcatttcctgtttgggactttgggtactggtcatgttttcatgttccacacgtaccaaagaaatggggatacgtaaagttcttggggcttcccgttggacactcttctatcagttggttaagggattctttctgttaattctgatagcagttgttattgctttgccactagcttggtttagtatgaatgcctggttgagccattatgctttccgcacagatttgaaagcatggttctttattatgcctgtattgctaatgttgtttatctcatttataacagtagctttccagaccataaagataataatgagcaaacctgcccgctctttacgatatgaataatctctgaatcactcaataggatattcgttaatatccaatttgatttatgttaaatgttaacgagactattacttttattaaaccatgttataagatgcgttgctttactccgaaaatttggagatatgctgaaagtccgtatctttgcaatgtgtttttcatagtattagatttaaggttaacaaaaagattggctgtctgggatagatagcctttttttatgctttttagtttccttctatttttcacaagtatatctaatttcctaattctttttcgtttgtgttctaaagtatgtttttcaacacatatgcttatttttctattgttttcttcttgcattctaaaaaaaatctcttaatattgcatttgtattatttgtcggacaaataatacaaataataaaaatctaatgatatgaagatagaaatcaatcaaacaacgttaattgatcaggtagaagacagcctgcttacctatttcaaaaagaatgatttaggacgcggggattctattcctaatgagaatagtctggctgcagaactgggagttgcaaggagtgttgtcagagaggcactgagccgtctgaagatgatggggttgattcacgcacgtccccgtaaggggatggttctgacagagccttccattttgggaggaatgaaaagagtgatagatccccgtgttttaagtgaagaaacaattttggatttgttggatttcagaattgcacttgaaataggaatatcaactgatattttccgtaagataactcctaaagatattgaggaactgagtgaaatcgtaaaaatgggaatcgtttttgaaaataacgaatacgcgttaattagtgaatcggcttttcatacgaaactatataaaatcaccgggaataaaatcatatctgaatttcaggaaatcattcatcctatacttgtctatgtgaaagagaaattcaaggattatttgaaacctataaatatagaaatgagcaaaagcggtcggatagctactcatgctgatttgctggactttatcaagaaaggggacgagaagggttaccgggatgctatcgaaaggcattttgaggtctataaaattttcaaggtaaaccgaagtcaggaattgatggctgagaaggcagaaagtgaaaaggtagaaggtatatgaaaaggtggcatctgataattttatgtttatccttaattttattgctaatgaatacatcttgttttagaaaagaagaaaagaggatagaggcacaatgggaaaatacattgttgcttccgggatgtgccggcatgccggagaacgtcggattagcaggtgcatattccgggatagtggaaggcaagttgcttgtgttgggtggagctaactttcctgataagtatccttgggagggaggtattaagacttggtgggctactttatatagctacgacttggatacagaggaatggactgtatatgatgatttccttgaccgtccgcttgcttatggggtttcaataagtttgccggaaggtttattgtgtatcggtggatgtgaccatgcgcggtgtagcgataaagtatttctgataaaaaaagaaatagattcatttgtgatagattctgtcagttatccttctttaccggttccattggctaatgcagcgggggctatttgtgataattgcatttatattgctggggggcaggagtctatggtaaatgaacggtcaactcatcatttctatatgcttgatttgcatcataaggagcaaggatggcaggtaatgccgggttgggatggtccttctctttcttatgcggtaggcgtcgctcaaagaggacggttttacctctttagtggaagaagctatgcaccggatgagttgatgacggaatatacggaaggatatgtatttgaaccgggtactgggaaatggaataaaatgaccggttctttcccggtgatggcgggtacggccataccttatggagaagacaagattttgatactgggaggagtggaggaaattttgccgacatctcccaagcacccgggatttagccgtaaacttcgggtggtcagtacggacatgaatgctttggtagatttgttcgattgttcataccctattcccgttacaacgaatgctgtttctattggaaatcaggtatttgtagtaagtggcgagatacaacccggcatacggacaccgttaattttgaaaggaactttccgaaagtgaaatataataatctaattaaatgcattatgaacaattatgaaagactggaaggtatggttgcggccaccttcaccccaatggatgaaaatggggacgtgaatttatctgttattgataaatatgctgattggatagcatcaactcctgtaaaaggggtatttgtgtgtggtacgactggtgaattttcttcgttgactattggcgagcgtaaggcggttcttgaaaaatgggtagcctctgctgctaaacgttttaaagtgattgcacatgtcggttcaaactgtcaacgagacgcaatggaactggcaagccacgcggcacaaactggagctgatgctatcgcttcaatagcaccttcttttttcaagccgggaacggtagatgaactggtcgatttttttgcaccgatttgccgggccgccagtgagttgcctttctattattataatatgccgtcaatcacaggggttaacttgccggtagataaatttttgatagaaggcaagaagaaaataccaaatttggtaggaacgaagtttactcataataacctgatggagatgggggcttgtatcgatttggagcagcataagtttgaagtattacatggctttgacgagattctgattgccggtttatctatgggagcagtggcaggtgtgggaagtacatataattatatccctaatgtctatcatgccattttcgaatcaatgaagaaaaatgaggtggaaacagcacgtgcctggcagatgaaatcgatacgtacagtggaagtgattattaaatatggtggcggcgtacgtggtggtaaagctatcatgaaacttataggtcttgattgcggcagttgccggttaccgataaaagctttttcaacggaagagtatgaaaaactaaaaggtgatttggatgcgataaaattctttgaattttaatgataagaaagaggagatgacagtaaaagtgtattgctggggtttagctactttacttcctgtctatctccccctaatctagttaaatgcgttcaaatttacctaaaataaagatactatgaaagtaagtaagaaaatatttatcatattttcgatgattttgttattgataccggatatatctttaggtaaagatataaggttggaactggaaagacctgttatccctgttttagtcaagaagcagattaatccgactattaaggcaactttgattcaaacagacaacagtccttataccattcggcaaattgatgttgatttgcagggaagtacggatttgtctgatattgtttctgttgcagtgtacggaactcataaaaacgggctgatagatgaatcccgtctgatatgtagaccggtacctgctgaacggaaaatttcttttacagataatatacaagtgaaagatgattccttgtctttctgggtagcagtgacattgagagatacggtttcactgacacatcgtattagtgtgaattgtagccggataaaaacgagccggggagagctgaaagtttcgaataaggatgttgtccccttgagagtgggaatggcattaagacagaagggacaggatggtatcgtttcatcacgtattcctggactggctaccagtaacaacggaacgttgctggctatatttgatgcccgttatgatttgactcgtgatttgcaggggaacatagatatcgctcttcatcgtagctttgataaaggactgacgtggcaacccattcaaacggtattggatatgggagaatggggaggtttgccgcaaaagtttaatggagtgagtgatgcttgtatccttgtggataaaaatacaaatgacatttatatagccggattgtggatgcatggtgcattggatgacaatggcaagtggatagagggcttgaatgaaaatagtacttactggatacaccagtggaggaagaaaggatcgcaacctggaatcggtttgaaagaaacctgtcaatttctgataactaaaagtacggacgacggactgacatggagttttcctgataatataacaggtaagactaaacgccctgaatggtggttgtttgctccggctcccggacaagggattacattggcagacggtactttggtttttcctacgcagggacgtgatgagaaaggaaccgcattttccaatattacatatagtaaagaccatggaaaaacttggatgaccagtaatccggcatattcgaatgtgacggaatgtaatgcagcacaattaagtgacggtacggtgatgctgaatatgcgtgataatagaaaccggggtaataaagaagtaaatggccggagaatttgtacgacaacagacttgggtgagacatggacagagcactctacatcacggaaagcattggtggaaccgacgtgtatggcaagtttgcaccgtcatgattatactgtgggtggagaaaagagaagcatattattatttgccaatcccagcgattatgagacacgggataagttgactttgaaagttagttttgacgatggaatgacatggcctgagaaatactggattttgtttgaccagtatcgtagtgccggttattccagtatcacgtcaatagatgaaaattcaatagggatattatatgaaagcagtcaggcaaatatggcttttattaaaattgatttgactgaaattctaaacaggtaagccatgaacagtaaaacttcaaatatatatccatgggtgatagtcggattactatggggagttgctttactcaactatatggatagacaaatgctttctactatgcggattccgatgatggcagatgtccgtgaactggagtcggctgcaaattttggcagattgatggcggtctttttgtgggtatatgggttgatgagtcccatttccgggattatcggtgatcgtatgagtcgtaaatggttgattgtaggcagcctgtgtgtatggtctggagtgacatatttgatggggtatgccaccacttttgaccagctttattggcttcgtggaattatgggaataagtgaggcattgtatttgcccgccgctctgtctttgatagctgattttcatcaagataagacacgttcgttggcagtgggaatacatatgacagggctctatgtaggtcaggcgataggtggtttcggagctacttttgcagccatgtattcttggcatagtaccttccactggttcggtattattggggtaggatatggggtcattctggcctttttcttacgggataaggaaagaggaacgatctctgttatgcaggaaaaagtgacgaagataccggttctgaagagcttggctatgttgttttctaatgtctttttctggattatcctgttttacttttgtgtgccgggcactccgggatgggcggcaaaaaactggttgccgactcttttttcagagagcttgtctattgatatttccgtggcaggaccgatgtctactatttccatcgctttgtcgtcactgttcggagtgttagtcggtggatatatatcagaccgttgggtgctcagaaatgtacgcggaagggtatatacgggagctttgggattgggttttatcattccctctttattgtttatcggattcggacattccattttcgcattagtgttgggaacaattttgttcggagtgggattcggaatgttcgacgcaaataatatgccgattctttgccagtttgtttcagcccgttatagggcaacggcatacggtataatgaatatgtgcggagtatttgcgggggcggcaataaccagtattctaggagaatctacggatgccggacatttgggacgtgattttgcgcttctggcagtatttgtattaattatgctggtcattctggtcacatgtttgcgacctaagaccattgatatgaaggattaatatttaaaactatagatcatgaaaaaaatactatgcataattgtcggtatgctttgtcttttacctttgggagcaaaggtaaagctaccggcaattattggaaatgatatggtattgcaacagaataccaatgtcaatctgtggggatgggctacacgttctcgaaaaattacagttagaacatcttgggataataaaaactatacaaccacttccgcatcggatggtacgtggaaaatacaggtacagacaccttctgctggtggtccttataccattactatatccgacggagaaccggtaacacttactaatgttctgataggggaagtatggttatgttcgggacagtcgaatatggaaatgcctgtaaaagggtttaggggacaaccggtggagggctcatgtgatgctattgcaacagctctcccatccgataatattcgtatgattacgcttaaaataaatagtagtcagactgttttagatgattgcgtggcaactccttgggtggagtctacaccggctaatgtcgcggatttcagtgccactgcctatttttttgcaagttatctgcgtaaagttttgaatgtgccggtaggtgtcatttgttccagttggggtgggtccaagattgagtcatggattaataaagaggtatatacggaaaaattcccggaaatatctttgtcggtactgaccaaagatcctaaagacattgccagaccaaaagatgaacccacgttactatacaatgcgatgattcatccgataaagcaattcaccattaaaggtaccatttggtatcagggagagagtaacttaaataatccgcaggtatataagcgattgtttccggcgatggtaaggtcttggcggaaggaatggaaccaaggtgaatttcctttttattatgtgcagatagcaccctatgattacggacggaaaaatgcagataagacggaagcggctgaaattcgccaagtgcaactggaatgtttgaaggagatccctaatgcgggtatggttgtcacggcggatattggaaatcgcacctgcgtacacccctctgataaggagagtgtagggaagcgacttgctctgtgggcattagccaaaacttatcagcgtagtggaacaccttatagtggtcctctctacaagtcttttacaatagataaggaaaagataattgtggagttcgattacgcagaaatggggatgacatcttatgacagggaaattgtcggatttgagattgcaggaaaagatggtatttattatccggcgaaggctgttctttttgataataaaaccaaagtgatgctgactagcgatcaagttcccgaaccggtaggggttaagtacgggttcagaaattatcagccgttgaatttattttcaaatttcggattaccggcttctccttttgttgcaaaataattttataatatatgaaacaagaaaatagaaaaacctgaaattagagttattaacttgtaatctacaatttatgttaaatgcattttttttaaagagtaagctactccgcatgtcgggtatcttattggttatcctctctttttgtatacctgcattctcggcttcgctcgaggctttgggtatagaacaaaagaaggtaacagtaaacggagttgttttggacgatacacgagaaccgttaataggggtttcggttttagtgaaaggttctcaacaaggaacagtaacagatttggatggaaaatattccatcactgctccggcagacggtattttggtattctcatttgtaggaatggaaaaacaggaaataccggtaaaggggcggaacaatatcctggtgacgatgagaagcagttcggtagctttatcagatgttgttgttatcgggtatggtaaacagtccaaggcagcattgaccagtgccattactaaagtggattcaaaagatatggcaatttcgccgacaggaaatccgatgtcaatgttacagggaaaagtgccgggtatggaaatccgtgtaaattccggccaaccgggggctgaccctcagattatagtacgtggcggaacgactactgcgcccgaaagtgattctcctatggtaatcattgacggcgtgattcgtactatgaaggatattaattatgcggatatagaaaccatacaagtattgaaagatgcagcttcaacagccatttatggttcaaaggcttctcgtggtattgttatgattacaaccaaacaaggaaaagccggtaaaggaagtatctctttcagttatggattgtctgtagaccaccagccgaaaagaatgccgttgtccggtgcccgtgaatatctgaccgcaactcgtacggctgcactgcatgcaaccgatccggataaatatctgtcaggtacgtttgcaatgagtaccgctaataaacgaaatgctttgaatacgaccgcttttctggatgattacattgccaattatggtcaaggatatgtagaagacctgttgtataatcaggggtgggagatgatggaagacccggcaaatcccggtaagatgttgatttttaaggaaacggactttcaggataatctctttcaaacgccagtcaaccatgattttaatataaacttcagtggcggcaacgagaaagcgacttactatatgagtttgggatatctcactcaagatggtattgttgtaggtactcattataatcgttggagttttcttacaaatgcttcttacaagattcgtaagaaccttactgtaaaaggtatggtaaactactctatgagaacgactgcgggcattaatgaaaataatgtaatgtcaagggctgccaaaatgccgcctacagtgcgccagtattatgaagacggaactccggcaccgggtgaattgacaagttcgttccgtactcgtctgcacgaagtttattatcaggagaaagaaaacagagtgagccgaatcaatctttctgccgaactggattgggagattattcccgggctacatctcaaacctatgttctcgtataccaataatgagggtaaagaccataacttcgagaggtataatgaagtggtgaagaatagaccggtgtccgaagcgcataatatggatctacattatcaatatgatcttattttgaattatgcgaagacaataaaggataagcataacttggatttgatggtcggtggcaactatatttatgataactggtatcgtttcagtggttccggttatggcggaacatcagattatatcgaaacgctgaacggtattgcgacggaatctgccaagactacttccacttttgaagagaagaagatgaatagttacttcgggcgtgtcaattacaattatgatatgaaatacttgttttctgcaagtattcgttatgacggttcttctcactttgccgccaatcataagtttgctgcttttccgggtgtatctgccggatggaatatgcatcgtgaggctttctttgaacccttatcgaaagtagtcagcaatttgaaacttagagccagctggggaaaaacgggatatgacaaccttgctctggaaaatacggaaggctcttatgaagccggtaaaaactatgcaggagaagccggtattttgaatacagtgcttatgaaccgcaatttgttatgggaagaaacaacctctaccgatttgggacttgaagccggtttcctgaataaccgtattaatctgtctttcgacgcttattataaaaagacaacgaaccgtttactgaacgagaatttgtggtcggaaacgggatttgcttcaatcaagtccaatttcggctccttgaacacgaaaggggtggaaatagccattaatgcgattcccatacaaacccatgatttccgttggaatatagatgccaatttttcgatttggagaacaactatcggcaagttacccaataatggcgcagataagaatcgtaccggcggcggaatcatttttgacccgaaactgggaaaatatgttgaagtaggtggatttgcggaaggagagcgtttcggttcccgttttgcttatcagttggacggggtttatgcaacagatgaagatgcagccaacgctccttatgatgaaggagtatcttccggttggttgggtaaagggaaatgtgcaggtgatgccatttggcgtgatgtggatggaaacggtatcatcaattccaaagacatggtgtttgtaggatatattcaccctgataagatggggtcttttaacaatactttcacttacaagaattttactttacggattgccacggacttctcattgggaaatgtgattgataaccatttcagggcacaggcgaacgcaaattcacggaataactttgcaacgattcatgatgtggccagtagcaagatgtggcacaaaccgggtgatatagcttctattcctcgttatgatgtagagtctgactgggataacggaaagcgtaatcatggtcgtccgagcagttctaccattggttttagtggtggcagtgccaacaccttgtatataaagaaaggtgattatctggcatttcgtgaagtctccctatcatatcccttgcgtaccaagtggctgcgtgctgctaagattgaaacgctggacttgacggcagctgtttataatttaggatattggactgcttatgacggacttactcctgaagtaattggtgctgatgccggtaaatattcccgtccgcgtcagtttatattctctgtaaaatttacaatgtaacattaaagtaaacgatgatgagagctaaattaataatgtttagtataatgactgcctgtaccttaggtagttgtgaatctatattggagatagatcctatttctgaaataactatggcaaattactggaaatcggaatctgacgtgaaaggctacctgaatggtctttattcggattatagaggaatgaccagtactaccctgtatggagaagatcgtggagatgctatggtatcgggagtgattggcggtgtttcacgttcgcatcagcatgaactgaatgaagaatatggattggactggcgtactttctatgagaacattcatcattgcaatatgataatcaaatatgctccgggaattgactttacactggaaaatgaaaagaaacgtatcttggcacaggcatatacttttagggcaaaagcctatcttactttaactcagatgtggggagacgtgcctgttgttttaaatccgacagaatcttatgataaggagtcacgcccgacgcgtagtacggcttcagaagtgatgaaacagattctttcagatgttcagactgccatcgatcttttcccggaaacgaatattttggataagaatcggatttcaagacctgctgcgttatgtctgaaagcggaagcgctggcatggaaatatacggttcagcggagtaatgacaagaatgacttgacagatgcgatttctgcattggaagaagtggaaaagtgcggtgtgagtatgatggataaatatgcggatattttcgatgtggcaaacaagaagaacagcgaaatcattttctctatttatctgaagaaagatgaatataacaatatgtatatgtctacgttgtccatgtctgccgcagccggactgctgactaacgatattgtgaacaaagaagacattccatacactaactccacaatcgcacgtcacgtgtatgctccgtctccccgtctgatatcgcttttcagtgacaaggacaaccgggcttcgtcagcttatatcaatgctataaattcaaaaggggcggtagttttcacttcacagaacaaatttcgggggacagcttataccgatgaccgttattatgataatgatatcgtggtttatcgtttgggcgaagtcaaattgttgaaagcggaattgttgtgttatctgggtggtgacaatgtacaaaaagccattgatgctatgttcgctacccgtaatcgtgccggaatcggagcgtataccgggagtacggttcagaaagtggttcagaaagagatattggacgaacgcggcagggaattgtgtttcgagttgaagcgttggcccgatctgatgcgggcacatcacgcgggtaccattgatatttatagttatattcctaatttggttggtaaatctactccattgtatttcccgattttgaggaagatgattgatttgaatcctaatttggaacaaactgagggttattaaaaaatagaaacaatgaaaaatttaaacttaatatttgcatgggtatgcctgttgtttatatcgacggcatgtaatgatgtggagccgagcatatcttctttaccggttcccacgagcaagccttattccatcaatagggaaggatatgcctattttagaatccccacgatggtaattactaacagcggtacaatattggcatttgccgagggacgtcgcaatggtcctgaagatgaaggggacatcgacatcgtgttaaagcgttccactgataaaggaaaaacttgggggccgttaataacagtcaaggatgatggagaaaatcgttgtcgtaatcaagtacctgtttatcttccggatatcaatcgtatcattttactatcttgctggaatccgggtgcaacaggaactaattcaatttttgtaacttattcggatgacgaaggattgacatgggcgaaagaaaaggacataactgcttccgtaactcctgacaaatatagatggtacgctacagggccttgtcatggaatagtgaaacagtttgagccgcataaagggagaattgtagtgccgtgtaatcataataccactacatccggtgcgggacgttctcatgtgatatattcggatgataagggagaaacttggcatttgggtggtattatggacgtggattatacgaatgaaagcactgtgactgaattaagtaacggtgatttaatgttgaacatgcgcaaacagtctgacacggaaaaatataggatggtctccaccagtacggacggcggactgacatggacttcgtgtaagtatactacattgaaagaacctatatgccaaggttccatactcttttacggtttgggggatgatggtaaaggcattattctgttctcgaatcctgacagtcagaccaatcgtaataataacacgttaaagatgagcgaggatgacggagtaacttggaagaagcaatattcctatacaggaagtgattatggaggatactcggacattgcccgttatcctgacggtacaattggagtattatatgaatatggtttcaagaatatcggaggcattgcttttcagaatgttgagttgtcacagctacaataaaacatgcgtagaattaaaaaatagattgatatgaaaaagataatatatttcttgttcgtgtgtgtcggggccttttatgcctgcaaagacgaggaacaagtactgttgaatgcagattttatttcagacaagcaaaccatatccgcaggggagaaggtatattttatggataagtctgctggagaacctgtacgttgggattgggcttttgaaggtggagaacctagtgtgtctaatctgttcagcccggaaatcgtgtataattatccgggaacttataccgtaaaattaagagtagggcgggggacggaaaatgcggagactgagatgttgaaatatatcacagttgtatatccggatgaaatcaccgtagcttttaaagccaataaaactcaggcattgagtgatgaatctattagtttcacagatatgtccgtaggattcccgtctacttggttgtgggaatttattcctgcagaaggccgtaccgtcacctcaacggaacagaatccgagtttagtatttgagccgggagtttactctgttaaattaacagttactaatcctaagacaacggctacgcttacgcaagagaattatttgaatattattgataagaattcagttgctgcagatattacggcagaccggcgtatggttatagaagggggagtcatatcattcaaggatactagcttgggacgtcctacccgttggaactggacgtttgaaggaggaacaccttctacttccaatgagcagaacccgactgttacttattcaactgccggtaagtataaagttactttagtcgcttctaatgatatgaatacttccacagctgaacaggaaggatatatcacagtattgccgggtaaagatattgttcttttctatccgttcgagggtgacagtaaagatatgggtcccaatgctattcatccggaaattcttaaattgggagataatatggatgtcaactttaatgcacctgcccgtaaggaaggatttacttgtgctgagttcagaagtaaggataatcagaattatgcattcttgtcgttgccggataatgatgcattagatttccaggcaactccggtgactacttctttctgggtgaaaacttcgaataaaacagctgctaatctgggggtattccagcatggatccggtcctaatgcaagtacagacggaaagaataagcagacttggtttagattccaaaaatccagtccgtttataagatatgtcattgagtactctgggctttccggaaactggactgattataagacaaaagccatgacagacggagagtggcatcattatgtatgtgttcataccaatggaagcacctatttatatattgacggagtaaaagcagcggaagcactcaataaaggtttgaaaccaattgatcggaagccttatttcatcggtgccatgtacagaggggcagaaggctcccgttcttatgagaactttatggatggttatatagatgattatctggtgtataatcgtgcattcacggcagcagaagcgaaagcgctttatgatagcatgaaataagtgatatcatattcactgatataagtctaaaggcaacttgctcatcggtatcgggagttagttgccttttcttgtactgtatttgtcattaacctgaattttttctttgtatatttgcaaacagatacattttagtattattatgaaaaatatttttattcaaattcttcgtgtcctgatgctttttctgcttcttatttcaggagttattggctatataatttacgaagatacattgtcggagtggtggatacctgtcggagtggcattgatgatagctgttgctacatttcctttctacatgaggtgggcatggctgacagccggagataataaaatagttaattttttgtgtcatttggtatgtgtgggagttatgagttatgcactgtttcttgtaggtaactattggttggcagaccctgcttccatgcaggaagaagaagttgtagtgcagaggaagtatcaggagacgcataagaaaacccgccgggtaggtaagaggcgttatgtaccggacggtgtacgtaaggagtactatttggaagtagcttttacaaatggtactatgaaaacattgcatgtaccactctctacttataacaagacacgacagggtgcaacaaagacattgactttgcagaaaggattcttcgggcttccggtgataacaaaaggactttaaagaaatatctgcgaaggactcattgcaatgagatatccgacttgttggctaaagccacttttctgcggagaagtaagtcggatatagttaatgcattttccatcgaatcgtttgataatttcataaaaccgtataagaaatgcaaggatattattcaagctttagaaacatttcttttagattgattgtcacgcagtcaaactgattcatcatatccataccgataatccccgcatcatctgatgtctggaaatcaccgtttgtagtatccactgcaagatttttcaattcgaccggaactttaccgacctttatgcggaaggacggtaaacgcaatatttcttttgttaccactatgttgaagccgccacccgtaatgtgttcccgtttgccggaagcgtcgagttcggacttatggccttcataatatcggtaatacaagccggcagtagaacatcctgtgtcaaagtgcaacttgagcctttccccattgtttgcctctgcttttattttcagtgcgcggtcggtcaatatcatgttacgtcccgaagcggggagcggtgtagatgatacaggaaagacaatttttttttctttcggatagatacgcagttcatcgaacaaattgataaaatccatgccgagaattgcgtcaaccctcatgacactgtccagcgcgttaggcggagcaacggtaatgagtggataatggaaaatcatgctaccaatctgcatattctccactgttcccatttgtccgttcatagctccgggaagcgttgaattgattgtcagcgaatcattcaacatacgtacacctacctctttggcaaaacgttcggacatgaaactggttccggcaccggtatcaaaaatgaagcggtatgtttttccgttgattgtaacaggtattaaaattgttgtaccccgccaacccttcggttcaacacttgtcggtagttttactttttctatttcaatagggacggatacatcgcaatccggtcgtgtgatacttggtgccgggatgctactcaatttgctatagaaagaaaagacctgttcaagtccttcataagcctctttctctgcattttgtgctttaagctggtcgatgatgctttgtgcattctgcgctgctgaagcataattgccccttaaaccgtctatttgacaggccagtatagtcatgccaagtacatttgaacctccaatttcattctggtgattggtaagtagtttccggatgccgcttattgctttatccggacggttgaagttataatcaatcatgatttccgacatcagtttaagaaaatcaacctgcatggaatcttttaagatcggatagttttcttccagaccgaaccagtccgactgattgataagtattccgatacgttcgtcggcactttgtgaaaaaacagggatagaaaaaaggaccgctgctaataaaaataatttcttcatttgttttgggtattttatagttctgtatttatgtgtatttttctgactatattttatttgttatatccataagctgttttgtttctttgggtatggtggtaaatatagtgaattaatcagaaacgtagaataaggttcgtttttattttaggaaagtttgttcaaaaacataaaattcgccctctgccaatcttcaaaagactgacagagggcggctaccatgacgagaaaaaagtcgaagtttattgcttggcttcgttattttgtttcaacagaaattcatcaattgctttcttcagttggtctttgggcaaagctccctgtgagattctaggctgttcgttcatcggaatcatcagcaaggtagggatgctgcgaattccgaaagcggcggccaaatcctgttcttggtccacatcaatttgatagatatctattttaccgctatattctttgctaagttcttcaagaatagggtgcagcgctttacagggtccgcaccaggttgcgtagaaatcaacaattgccggacgtttgccttcaaatttccaatcgttcggattggcttcataattatatactttcttcaaaaagtccgctttatttaatgctattacttccattttattttctttttttgttggttcattactctttttattttctccgctgtttcctgcgcaagcagtggtagcaagtacgatagcgaaggcactcataatacttttgattagtttcataattcttttctttttattttttctctgatgcaaagatagagggattacagttcccctgaaatggcgatttggccggaacacttggcgaaatttcctttagacagttagttaatgctaaaatatgtcttttattctttggtagggaagagatagacttgtttgtggatatggtgtacgagtggagattgtctatttggaatagccgtatcacatctttgttgacggaagcgcatgaagtggtgtatcatgtgtcatagtcaaggagtattatacttcggcttctcaggctaaccaccaatcaatttgcaggatattaggagaaaaacggagttatttattttttgagtattcgttttaaatagtcggtattcgttaagttcactgtctcgaaaacacctttataaaagacggcaaagttattgaatacgcaaggcaactcctttgctttttgtagcgtatccacttggacgaaagatacaggaacgtcatttgtttcacaaaactgttttattatgtcaatgtattgataaatataagggcattgcatatcatgataaattgtcagttctttgttttcaatctctagtttcttggcgtttggtgcaaacttgggtgttgttccgtcaaaagagagagctaacaactcatatccattatcggtagtatcgacaacctcaaagccgaactttttggcaaatgtctggtcggaaagccagctcttttgtttttttgccccgagcatacaaacaccggatttgcctttctctttcgcatcagccagacaatactccatgagcgattgtccatatccttttcctttggagctacccagcacccatagacaatacagataataatagttgttgccgatgataggaacccaagctgtttcaagaggggcatattcgataaaaaccgtggactttgcatttaattttctaaagatatgaccttcgctcagccgctcggaaagccattggcgtttggcatcaatacccggatgagacttcttactgcggataatgcaacataaatgttcatcggtaaggttttcattcgtcaggtttataaaatcagtattcatgtgtacgtttgttttaggtttggacattatcaatcagtaagatgtattgagcctatctattatcattgtacaaatgtagcgaatttatgtaatattgattacctataaatgactttcatttatgattgaagtaaaatagagcaaagccgtacagatttaaacaaaataatctacataacgaaaaagtatgcatcatgctatcattcattttaataacctcttaattattagaaaaataagtatgatagatagttttttagaatgtatctatcatacttttacagctaaaatagagtatctatcatcaataagatagttgaataaaggatgggcggacgtaatatagcttgtttttgttgctatgaatccgtataaatccgactatcatgggttgataatccaactttagcagctctaagtttgcatcccacgtatgcgggctgtgcatcccacatgtataaaccgtatatcccacgtatgcaggctgtatagcccacatgtgtgggctataaaaatacgactatttctaatagattgttaagctgtcagatataggttatcttactatagatcgtgcattcttatgcctttaaagaaagaattttatttaatgctatactggaattaggtataagctgggtatgatagatatacgttttttacaataaaagtatgatagataaattaaaaaaaactgtctatcatatttattcttttgataattaagaggttattaaaattaatgatagcgtgatagatattttttcattatgtagattcttcttcaaatttggtggtaatttaaccagtcggtggtatctccattcccctccttcggggaaggaggggtggctgaaagccggggtggtaggtggatacacaatgttgataataaccgacttacgcattcacctaccacttccccctacgggtactcctccttcccgaaggaggagaatggagaatactatcgactatcaaattattattttcttaattaattttaccaccaaatttgaagaagaacctcatggaattaaaattattccgacaaagaaatacttttcgggaactaactgaaaatatagacgataattccggtaattagcacataagttaatgcgtacggaatagctgctttcaggatttccccctctttaccctgctggtttccggcggaagtggcaatagcgatactttgcggggagataatcttaccgcccgtagcacctaccgtatttgcagcggaaagccaatcggggctgacatgaatttgtcccgctacacttgcttgcagtttgccgaaaaggatattggatgaggtgtcgcttccggtaataaatgttcccaggcaaccgatgaccggtgcgaacagcggatataaacttccggtagcagtggcgagtgccgtggcaataacggcaatcattcccgaagcgtccataatggtggataatccgaccaggcagataaccgtgacgaaagtttttttcaactgtttcaccgtattccaaagtacggtgaacaagtcctttacttttgctccctgtatcaatccgccgataaaagtacccacgaaaagcaatactcccgcatgagtcagccatgaaatagtgtaatttacggtagaagcattgataggcagactgattttcgttatccagttattttccaatgtatggcgcaatcccgggaatagtgggcttgtaagaataataaggacgagaataagcagataaatactccatgcattcagaatatctttcgtcttcaacgagcttttccgtgccttttcttctttggatgcagtcagtttgccataaaggacgatgatgatgatagacaggatgcttccgatgatagccggagattccgctcccatatatctggctgcgaggtattggctgattaaagaaacactgcctaccaataaagccaagaacagattcttggggagtgatttcagtttggggtcggtaaggaaaagcaatacaaacggaataaggaacatgaggactgataattgcaatacgacattggtactaaggttcagaacatccagattcgtctcctttgccagtacgagcaccggcgttccgatagctccgaaagcagtagccacactattcgctatcaagctgaccgtagccgagaatatcggcttgaaccccaggctgataagaatcgctgccggaatagcaactgccgttccgaatcccgccatcgcttccagcaatccgccgaatccccaagtcaataacaatacctgaatactcttatcggtggaaatggaagcgaactgttgctttatagtctccattttttctgttttcagcaatacgttgtagctgaaaatagccattagtataatgattaaaataggggagacagcttttaacgctccgtatagaaaggaataaaacagattgtccacagaaaaggtgaagccgaaaagtgcaatcagcatggttaccactaaggaaatgatactacttttgtcgcccggcattttgaagaatgccattaatatgattaataatagtaccggaatgatagcaagaatcaaggtcataatagtctggttttaaaaagtaagacgttcatttgttatgagtataacaaacaaacgtctcacttgggtcgatgcggcaaatagatttttctatttatttcatcttcacatttaatatttgctgtaactgtttcaggttcgcctgagctgcttcgttacctaatttggcagcttgttcgaatgcggccatagcacgttggatatctccgttcaggaaattgtaaactccggtattgttcataaattcggcagttgtgtggtctgctttttccatatatttcacggctgtattcaagtctttctgtgataaggcgacggcagcagcattcaggttggctacctggtcggtaggatacatacgtactgcgatatcgaatacattcacgaaatctttgctacctttcggataactgttggctacctgatacatttcattcaggctcaaatacttcggattctcacgaatgatgatgcgtccttgttctacgtcgaaattgacgacggtatagtcgatcttacaattcaccttacgcaatcccggatagatttccttgagcatactacgatagggagctccaccgcccacacgcatgatttcctgtttccgtttggcgtcatcagtcgtatttttgataatattcaggaaagtttccttgtctttcatggacgaggactttaaagctttcaccagtccgtcccagttttcgccgccgaaagtcactttataaagtttggaagaaactttctcattcttgaccagataatctttcaaggcttccgcacgtttcttggaaagctgttcattgaaggccagcggtccttcgggagaggcgaaaccttcgattccgattccttttatagtcaagttcttatcattctgaatcttggcgaacatggaatgaatattcaccagttcggtatgattattcataaagtcggtaaggataactgatttgttgaccgggaaatccagatgagcttcatattgttcgctacggtttttcacaacttctaccgtaggctggatataggcgacgaaaggagacatggcacttaaccgtttggcttcggtagatacgtcgttggtgattaattcttgcgcgttcatctcctgataattgccacagccgcataaattctccacgagctgtaaggaggcgttgctcatccaaggcttatatggaatgatctgcgtataattaaaagtctcccgtttgttataagggacgataagagcagtcggttcctgtttggtaatggctagtccgcggatataggccttttcgcgtcttttaccgttgacgataatttcttgcagggggacgttgtgctgtccgtctgtcaataaaggaatcaggctgaggcttcgggtggagcctattgtcagtttgctcatgtcaaaagtcattccgacatagagcgagttaccttgttgccataacgatacattggagagagtgagttcatcattcagaaatttctgtgcatgtgccggcaatattgcggcggcaaaggctataaatagatagataagttttcttttcatctttgtaagtttttggaaggttcgattatttgatgatataaatgaagcttaaaccgactttggttggaccgaagtaattgcggttgttatgtcccagcttctctcctccgtcgccacgggcgtatttatcatatttcaggtgggcatatccgacgcctatggtggcctccatgctccaacgtttgcttattatccattgataaccataagagatacccgctccgtatacattcccgtcgtaacggtcgtgccccattccgaagatattcaggttgctgacattcatttctccgtaatgtccgtgcagaccgaagaaacttccgttgaaacgttcgcaaagccagtaacgcagttccggctgaacaagccaatgtttaatctggcggtcatctccgaatttccacgggttgtaattacccgatatgtcgagggtgagtttctttgccagtcccacttcgaagccgaggttgggcgtggaggttgcccaatagagggcattggtcttgatagcgaatttaggtagataggcttcgttccgttgtacttgcgcataaatgcttgtaccggacatgagcaggaaaccggctgctagtaaaaatttaattgttctcattttgttagggtctagattttattaaaaatgatacgcgataaacagtaaagaacgggtgtttgttgtctccgtctgcaaaaaaaatgatgccttgaagaataaataaagatgtttaaaggcataaatgctaacattttcgggatgtcgtgcgttcattatataaaatacctttgtgtaatcaatatgacaatgattctatttattactgcttatttttacacacatacaattttaaattaaatagagcctatgaaagagcttatcaagaacctggaagaactgaacaggaaagcagaaaaaggcggcggcgacgcacgcattgaaaaacaacattccgtgggcaaactcaccgcccgcgaacgtatcgaattacttttggaaaaaggttcgtttatcgaactggacaagttggttactcaccgttgtaccgatttcggtatggagaagcagaagtttgcaggagacggagttgtcaccggttatggcatgatcggcaagcgcctggtttatgtctttgcacaggattttaccgtgttcggaggagctctttcagaaacacatgccaagaaaatctgcaaggtgatggatatggcgatgcaaatgggggcacctatcatcggactgaatgattcgggaggtgcgcgtattcaggaaggtgtccgttctctggcaggatatgccgaaatattcctgcgcaactctatggcgtcgggagtgattccgcagataagtgcgattatgggaccttgtgccgggggagctgtttattcacctgcactgactgactttattctcatggtaaaaaattccggctatatgtttattaccggccctgatgtcgtgaaaagtgtgacacaggaggaggtgagcaaggaagatctgggtggagtaggcgtgcacatgaccaaatccggcgtggctcatctttccgcagaaaatgatattgaatgtatcaactatatccgcgaactgatttcttatctgccgggaaataatatggaggaacctccgtttgtagcaacgagcgattcgcccactcgcctgactccggaactttctaatttggttcctacgaatccgaaccaaccttatgatatcaaggaaatgattgaggccgtggctgacgataacagtttcttcgaacttcaggcggaatttgcggcgaatattgttaccggttatatccgtctgaacggaaagacggtgggagtcgttgctaaccagccgttggtactggcagggactttggatattaatgcatctgtcaaggctgcccgtttcgtccgtttctgcgacgctttcaatatacctttgctgacattggtggatgtgccgggattccttccgggaatagatcaggaatacggcggtattattcgtaacggggcgaagttgctgtatgcttattgtgaggctaccgttccgaaagttacggttatcacccgtaaggcatacggaggagcttatgacgtcatgagttccaaacatatccgtggtgatgtgaacctggcttatcccactgccgagattgcagtaatgggaccggacggagcagtaaacatccttttcaagaaagaaatagaaaagtcgcaggctcccgcagagaagcggaaagaacttcaggacgactatcgggaaaagttcgcgaatccataccgtgcggcagaactgggatatgtagatgaagtgattgatccggcaatgacccgtttgcgcctgattcgcagcttcgagatgcttgccaacaagcggcagtccaatccaccccggaagcattcgaatattccgctttaagaagtggagagttgagaatggagagtattcattaaaaagaaaaagattatgataaagaaaatattagtagctaatcgtggtgaaatagccatgcgcatctttcgtacgtgccgggtgatgaatatttcaacggtagctgtatatacccatgtagatcggggagctttgcacgtccgttatgccgaagaagcctattgtatctccgaatcacccgaagatacttcctatctgaagccggaacttatattgtccattgccaaaaagaccggagccgccattcatccgggatacggattcttgtcggaaaatgcggattttgctcgtcgttgcgaagaagaaggagtgatttttattggtccgggtgccgacattatagctaaaatgggaatcaagacggaagcccgtaaaattatgcgtgaagcaggacttcctattgtgcccggaacggaagcgcctgtgcagggaatcgaggaagtgaaaaaggtggctaaggaagtcggttatcctatcatgctgaaagcacttgccggaggtggagggaaggggatgcgtctggtacgttccgaagaggaagtggaggcggctctccgtctgtctcaatctgaagccgggacttcgtttggtaatgacgctgtctatatcgaaaaatatatagaaaacccgcatcatattgaggtacagattatgggggataaatatggtaatgtcgttcatctgggagagcgtgaatgttctatccaacgacggaatcagaaggtgattgaggaatctccgtctccctttgtaaaggaagatacccggaagaaaatgctgaaggttgctgtggaagcctgtaagagaatcggttattatagtgccggaaccctggaatttatgatggataaggatcagaatttctacttccttgaaatgaatacccgtttgcaggtggaacatccggtgacggaagaatgcaccggtgtcgatctggtacgtgatatgataaccgtggctgcgggcaatcctctgccttataaacaggatgatataaagtttagcggagctgctattgaatgccgtatttatgcggaggatccggaaaataactttatgccttctcccggcgtgattacggttcgtgaggctcccgaaggacgtaacctgcgtctggatagtgcggcttatgccggatttgaagtttcgctgcattatgatccgatgattgcaaaactctgttgctggggacgtacccgcgaatcggctatttcgaatatggcgcgtgcgttgcgcgaatataagattttgggtatcaagacgacgattcctttccatcagcgtgtattgaagaatgcggcatttctggaaggaaagtatgatactacttttattgatacacgcttcgataaggaagatttgaaacgccggcagaatactgatccgacggtggccgtcatagctgccgcagtaaggcattacgaacgggagaaggaggccgcctcgcgtgcaacgacgcttccggtagtgggagagtcgctctggaaatattacggtaagttgcaaatgacagccaataattattaaactaaaaactaaagaaatagcttatgggtacaacactggctacatattatgccaaacttcaggatatgccggatagtgaatataaggtggaaattctggaagatgggccaatcaagaagattgcagtcaatggcaaggtatatgaggtcgattacaatatggggggtgactctatccattcaatcatcatcgaccatcattcacatggagtacagatttctccttcttccaataattcatatactataatgaataagggggagttttatcagattgagttgcagggagaaatggaaaagatacacaatgcccgtagcggggcggaagctgtgggacgtcaggtggttcaggctcctatgccgggagtgatcctgaaaacatacgtaaagaagggtgatagcgtgaaacgcggcgatccgctctgtgtgttggtagccatgaaaatggaaaatgagattcgtgcggtgaccgacggcgttgtgaaagaagtgttcatagaagataatatgaaggttgggctgaatgaccgcatcatggtaatcgaataagtggtctgtagaaacaaaagactagcctgctaaatagtgaggctagtcttttgaagtcataagtcttttatttccggaatcaatataaacttcgtgttcggaaaatacttcttcaaccagttttgaatgaagttcatcgtatcattctgaatcgttttatcttttggggtgggatacatattgtaaagtaccgtatccagtacaatatcacgcttttgtatggcctcaaggcttaaaagggtgtgattgatgcttcccaatttcccggaagtaacaaaaataagaggataattctcttgggcaatgtagtctattgtcagaagttccgtagttaatggaaccattaaaccgcctgcgccttcgagtaggacataatcatatcgttcactcaattcttccgtagcacgtttgattttaccgaagtcaatgggacggttatccagttgggaagcgaggtgtggagaggcaggataggagaatatttccggcatagtgagtccttccttgtcttcttctgtaaaggggattcccataatatgacgatgcaagtcaatatcctcggaatgaccgacgtttcctgtctggatgaatttttgagtgatggtacgttgtccgttcttgttccattcacgagctagaaatccggtggcgtagctcttaccggcatcggtgtcgatgccgcttacgaaatatacattctgtttcatacttttttcttttttgcgataatataaatggggtggtaagtcagggatactgaagtgccctgagtaaattcttgtgtgtaacgttcactgaataactgcaagtcacggcgtgtccgcagttgttgggaagatgtgccggttactcctgttactcctgtctgcttcaaatgataaagtacttttatgggattatcaaacgaaagagaaataagttcttcttccgaatggagtatgtcaaagtgagttgacagggctgttacaagttcttcccgtgaacgataagggagtccgcttcctgttagctctcgtatctctttcatattctctttcccgaaagtgctgaaagcgaaatagccttgtttattgagcaaagcattgcatcttttgaaaaagttttcgggagattcgaaccattgcaacgcggaacaggaagttatcaatgtgcttccagtagggaaaggaacgatttctgcatctcccggaagaaaggatacttgctcttttcttagtatatcctcacagcagtatttcatctccgggcaaaggtcgttcaggaataattcttccggtcgtagagcctggagcagcatacgggaataaatgcccgtaccgcatccgaactcaattactttagaacaggggaaggatatatgttttgtaagcaggtgaatcattttatctgcaatctgccgctgtacgtttgcttcctgcggataggtagcaatggctttagagaaacgttttgaaattagttgtttatccataaatcaataattagttgatacgcatgattacgttatcaaaaagttcttgttgatagtgggcggcttctgtatactcaagagaatccactttgtttctccatgccagccattggctatccggcaggaagatatggtcgttctttcctatgatggctttttgccatgcaaagtccgaaggtggtaatgataagtattgcttttgtatggcagcaagttcttccttgagttcttcaatggaacgttggggagctactgtctgaaaagttttgtaaccggctgttgaaccacacatccgtctttgaaatttttgcaaggattgttcgttcaaaccttgcaatgtcccttcgaaaatggcaggagtgatccctttcgtttcatgtataggataaggggtgccattgatagcgatactttgggagaggggcagggatggatattgtttcattatctgagaagctgcccatactcccatggaccaggcaatgagggtaatttcggaatactcttgcaagatgatggcatcgaactctaatgaacgataatcataacaaatcagccaatccttattggtcgggcggatttgcaaaaatggagtttcatccattccccaacctgcgaagaaaagcaatagatgcttttgattattttttatgataaaatgctgtttcatccgtttatcaattttataagttggtcgatttcgtgttcggtgatgtccgctgttaatgagaagcggatgcgtgaagtcccttcaggaaccgtaggcggacgtaccggcaatgcatagaatcctttgcgttggatttcttctgctttacatatagtgttttcacttgcccctacaatcatagggacaatatggcttaccgaaggacagttatatcctttgtcgacaagtgcagtctttagtttgttgctgatccgtaacaaatgagtccttttctcttggagagagggtagttgttctagtatccacgaggtccattgaatattaatgggtggaagggctgttgtgaatataaacgtgcgcatcttgttgattagatattcccggataacttgtcggcaggcaatgtaagctcctgctgaggctattgctttcccgaatgttcctaccagaaagtctatatcgttgatgcaattttgttcttcagcacatcctaatccgttgtctccccgtacaccgaaagcatgggcttcgtccacgtaaagaagaatattggaataacttttttttaattggacaagggcatgaaggtcggcttcatcaccgtccatgctgaagatactttcagtgacaataatgatttgctcatacgcattgtgattctcggaaatcaatcgctgtaactgggataagtcattatggcgataccggatacatttcgcagatgacaacctgattccatctatcaaactggcgtgtaccagtttgtctgcaagaattaatgtctgagcattgctgacggcaggaagaatccctgtattggcatgataaccactattgaatataagtgcgctttctgttccgaacatggctgccagttgttgttccagttcttgataatcggtaaaattgcctgtaagcaatcgggaagaagaagaggtaggcaggaatgtttcaggagttattgtctttaggaattcctttctcagcgatatgttattagccagtccgagataatcattggaagacaggttcaccatccgttgcccgttcagaattacattccgcccgtcgtggatgaggggtgggagagagcgataattcttcttttcctttagagtaagaagttcttggtttatatggtctgatatcataagttattgatgtatattttattacgttctccactgattaccttgagtaatccggtcgttagtttgcttagttgttcgggagtgatgataaaggggggcatcagatagacgagctttccgaacgggcgtacccaaattccttcttccacaaaacggcgttgcataaatgccatatttaccggacgcttcatttcaattactccgattgcccctaatatccttacatcggctacttgtggaagttcccgggcaggtgccagttcttcttttaattgtgtttcgattcgtttcacattctcctgccagccggattggagtaataaccggacagacgcgcaagccaccgcgcaagcgagcggatttcccatgaaggtaggaccgtgcatgaaggctcccggtgtatgattggagatagtatctgccacatgattactagccaatacggcagaaagtgtcatatatccacctgtcaatgctttcccgatacacatgatatctggctctactccggcatattcccaggcaaaaagtttgccggtacgtccgaatccagttgcaatctcatcaaagattaaaagaagtccatgctctttacaaagcttttccgcttcgcgaagatattgtggatgatagaaccacataccgcctgctccttggacaataggctcaagaatgagcgctgctagttcctccgaatgtttttctattgtttttcgtagcggttcgatgtcctgaggattccattcaccgtcgaaacgcgataaaggagccggaacaaaataacggacaggaagtgacgcaccgaaaaggctgtgcattcccgttacaggatcacatacggacatggcattccatgtgtcgccgtgatatccggaacggatagtcacaaagttatttttatccggttttccggctgcataccaatattgtacagccattttcagagccacttccaccgctaccgaaccggaatctgcatagaagattttctgcatggagggtggtactaaaggtaatagtaatttacccagttcaatggcagggtcatgtgtcaatcctccgaacattacatgagacattttatccaattggtctttggcagcctgattcaatgccgggtgattgtatccatgcactgcacaccaccaggatgacatcccttcgatgagtgttcgtccgttttcgagggtgatagtggctccgtccgcccgttttactttgtatacaggtagcggatcggtggtggatgtatatgggtgccatagatgttcccggtcgaattgagagccggcaaactgatacccttctttcaggatcatttgcttgtcttccgagactttggaaccgagtgtagtgagtaaatcacctacaatggcggaattaataccaatgtataacgctttgctcatagcttcggaagatagttgtgaacgtcctccggcaaaacgcaggaaagcagttgggttaatgaaacggaacaaggcaattgttctgagaactttttcttcactcaaaggcttttcgttctccaacggcgttccgggtatcggactcagcaggttgataggtatggattggacattcagtgctttcagcgtaaaagcgaattcaatccgttgttccattgtttctcccatgccaatgataccgccgcagcaaatatccatacctacacggcgggcagcattgagggtagccagtttctgctcttgcgtatgtgtggagcatagtttcgggaaataggaaggtgcagtttccaggttgcaatgatagcgggtaattccggcatcgtgtaatgcatgcaattcgttttcgtcaagtagtcctaaggaagcgcaaagctgaatcgacgagtatcgtcgtatatgacgaacagtatcacaaagttgggttatctgtctggaagaaggttttcgcccgctagtgacgagggagaaacggttgacgtcttgggtttcgttgtatttagcctgtcggagacactctttagcgggaaggaggtcgtagacttcggcttgcgtcttgtagtgagaggattgtgcacaccatttgcagttctccggacatctgccggacttggcattaatgatagaacacatgtcgaattcgtgtgaagcacgtgcgacggtaatctcgtgcgcggcggcatagagcgcctcgctgtcagccatattggccagccaagcggcttggtcgggcgatatgtcaatgcctgccaacacttggtctttgatttcttgaagtgtcataaatgtatgataagggatagtttgtgcagcattctgcttgcgaagggcaacgtccaccacattggtatgcagatgaccgatttggaattcacgtcccatacttgcaaaggcggcatagttcttcctgccccagtagcggaaacgggaaagaagggtacgtgtggtctgtatatgacgttgtttcttcatttggttcttgttttaaaggtaagaacggggcaaatgtacaaagattctttggataagcaagcaagttagagatttctgatgtatgtatttttatttcttcttcctatattctttgcgcaaatggaagttgaagcctgcatacacttgaagtgtgccgaatccgttgtccaaagagaaattgttccgatgataattatagttttttccaacaaaggaggaaccgacaaaatactttccgttattgtagacaatgcctgcgcgaatcagaaagtcgaggttgaatttactgtaccattgttttccttcgtgggtttccgcatctacgtcggaagccttgtaggcaatggcgggggtgagagagatacaagccaggcaattacgcgcaaatacccagttgtaggcataaccgaaactgatattggcattggtgtatttgattttattgactttcatacccggattcatcttttcttgaatatactcgggtaattcttcataatcaaaatcaaggttgtgttttgaaatagaaaaacctgcaatgaatgtacctgcattacgacgctggttggttgactggctaaaagcagccggataggaaaacttccggttattaaatatataatataaattcaagcctttgatatctactttcaggccattgaagttttcggaataattggaaggaatctcgtcatagaatcctctgattttatgaattttataattgtttcccgtgcgacgatagaaaatatctacacccagcttggaactgtaaaggcttaggtcgaactccgtacctttattctttcgattggttttcctgtaaatatcgtccacatcaacagaccagcccaggaaaatccacctccagccaaagtacaatccgattttgttatgtggattgggggagaaactgagcttttgaggttggggcaggtcactactgaccgagtagtattcgaagttgctgaaatgagtggccattagcgcataattatatcggttgggactgatatagagcgtatcgaaatcactgaagttcatgaattttttgatggctcttttaaaggcgctcggtcggacggatgtgagtgagtcggcttctatattgtcattcatgagactgtccctcttttcagtttgagcctgcaaagagagtgacagcagcagaaagaaagatagaataagccgtttcatcataaggttcttcgttactgttatagatgttgttcgtttcacgaaagtactatctttcgctgatttatgctaacaatcatctaaaaaatgtttcgtttcctaaacaaaaaacttctctatactgttaattacggcaagcaaataaatattaagccacaaaattatgagaatctatttacatttattagcagcgttttttctgttttttgcaggaagtatatatgcaaatacacaacaggaaaaacgcgtgacggggacagtaacttccgaaggggaaccgctgcccggtgtttccgtacaactgaaaggggcttcttccggtacgattaccgatattgatggaaattactctattgaagctcccgtcaacggtacgttagttttccgctttgtaggaatgaaaacagtggaacaaccggtcaataaccggaatgtgattaacgtgacgctggactccgaaagtaaggaactggaagaagtaatggtagtagcctatgctaccgccaagaaatatagctttaccggggctgcttcgacaatgaaggcaggcgagattgagaagttgcagacttccagcgtatcacgtgtattggaaggcactgtatccggtgtacaggcaagtgcggcaagcggtcagccgggaacggatgcggaaatccgtattcgtggtatcggctctattaatgcttccagtgctccgctgtatgtggtggacggtgttccgttcgatggtagtgtcaattctatcaatcccgatgatatatcttcaatgactgtcctgaaagatgccgcatcggctgccttgtatggttcgcgtggtgcgaatggtgtgattatcattactaccaagcagggacagcaggactcgaaggcgacggtaaaagtgaaagcgtctttaggaggttccaatcgtgctgtccgtgattacgaccgtgtcagcacggatcagtactttgaattgtattgggaagcgctgcgcaatcagtatgccaaaagctcggattatatttccgcaactgccgctgcccaggcttccaaggatttggtaacgaaattaatgggcggaggtcccaatccttatggtccgcagtatgcacagcctgtcggtacagacggaaaattggtagcgggtgcccgtccgttatgggattctgactggagcgacgctatggaacagcaggcgctccgtacggaattgaatttgagtgtttccggtggcggtaaagctaatcagtatttcttttccgccggatacctgaatgacaaaggtatagcactcgaatccggttaccagcgttttaatcttcgttcgaatataaccagtgaaataacttcttggttgaagggtggcgtcaatttgagtttcgcccactccatgcagaattatccggtatcgtcagactctaaaaccagtaatgtaattacagcaggacgtacaatgcccggtttttatccgatttatgagatgaatgccgacggaagctataaactggatgatagcggaaaccggatttacgatttcggctcttaccgtccttcaggctctatggcgaactggaacttgcccgccactttacctttagacaaatcggagcggatgaaagatgaagtttccggtcgtacttttctggaagctacgattattgaaggattgaaattcaagacaagtttcaatttcgacttgataaactacaatacgttggattatacgaacccgaaattgggtcctgccaaggaaaacggaggtggtgtcagtcggttgaatactcgtaccttttcctggacatggaataatattgtcacgtatgacaagactatcggtgaacatcattttaatgttcttgccggtatggagtcttactcttatcggtatgatgaactgacggcttcacgttctaaaatggcgcaacctgatatgccggaactggtagtgggttcgcaattgacaggaggttcgggttatcgtattgattatgctttggtaggttatcttacccagttactctatgactaccggaataaatatttcttctctgcttcttatcgacgtgatggttcttcccgttttgcaccggagactcgttggggaaacttctggtcattgggtgcttcatggcgtgtcgatcgggaaagttttatggcttccacttcagactggctttctgccctgacgttgaagatgagttatggtgcgcaaggaaatgacaacctgggtacatactatgcaagcaaagggctttattcaattgtttccaacttgggagaaaatgcgttggtgtccgaccgcatggcaaccccaaatctgaaatgggaaacgaacctgaactttaatgtcggcattgatttttctctgtttaacaaccgtttctccggttcgttcgacttctttacccgtcgttcgaaagatttgctttattcgcgtccgatagctccttctttgggatatggctctattgacgaaaacgtgggagcgttaaaaaatacgggtattgaaatggttcttaacggaacgattattaatcagaacggttgggtatggaaactgggaatgaacctgacgcattataagaataaggtgacggaccttcctttgaaggatatgccgagaagtggcgtgaacaagttgcaggtaggccgttcggtctacgatttctacatgatagagtgggcaggagtagatccggaaaatggagatccgctgtggtatatggatgagaaagatgcaaataaaaatccgaccggaagacgtgtcacaacaaacgattatagttcggctgactattattatgtcaataagtcgtctcttccgaaggtgtatggcggattcaatacgtctctttcctggaaaggattcgatctttcggccatctttgcctatagtatcggtggatatatctacaatcgtgatattacgatgattctgcacaatggtagcttggaaggacgcgactggtcgacggagattctaaaaagatggacgcccgacaatcgttatacagatgttcctgccttgagtactacttctaataactggaactcggcttctacccgtttcttgcagaataattcgtatatgcgattaaaaaacctgacactttcctataacttgcccaaacagtggatcagtaagttgtcattgagcagtgtgcaggtgtatgtgcaaggagataatctgtttaccattcatcggaatcaaggactggaccctgaacagggaattaccggtattacttattaccgttatccggctatgcgaaccatttccggaggtatcaatgtttctttctaaattcagactaaattatgagaaaaataaaaatacaatccattcttgtagctgttgccggtctttttctggcaacgagctgtagcagtagctttttggatacagatcccacagatgcggtaagttcggataaggtatctgtacccgaaaatgcggaagcacttgtaaatggtgcctggtataatctgttcgattattcaagtacctatgccaatattggttatcgggcacttcagtgtctggatgatatgatggcaagtgatgttgtttcccgtccgaaatatggttttaattcttcgtatcagtttaatgatatagcactttcttcgaacagtagaacagagtttgcctggtatctgatatataaaacgatagataattgtaatactgccatttctatcaagggggattcggaagaactccgacaggtacagggacaagcattggcattgcgtgctttctgctatttgcatctggtacagcattatcaatttacctatttgaaggataaggatgcaccttgtgttcctatttataccgaaccgagtaataatgagacggtaccgaaaggaaaatcgacagtggcacaggtttaccagcgtatttttgacgatttgaacttggcgcaggattatttgaaaaactatgttcgcagtggtgataaccagaagttcaagccgaatgtagcagtcgtcaacggccttctggctcgtgcctacttgctgaccggacagtggaaagaagctgcaaaagttgctgaagtcgctcgtgcaggctatacattgatgacaactactgccgagtacgaaggttttaataatatatccaataaggaatggatatggggattccctcaaataccttcccaatcggacgccagctataacttctattatttggatgccacatacgtcggagcttatagcagttttatggctgatcctcatttaaaagatacctttaccgaaggtgatattcgtttgcctttgtttcagtggatgcgtgaaggatatttgggatataagaaattccatatgcgtgcagatgatacggctgacttggtcttgatgcgtgctgctgaaatgtatttgatagaagctgaagcaaaagtacgcgatggcgtggcgttggcgcaggctgttgcacccttgaacacgttgcgtaatgcccgtggagtaggggattatgaggtaacgggaaaatcacaggaagatgtaatcaatgagattctgatggaacgtcgtcgcgaactttggggagaaggatttggtattacagatgtacttcgtacacaaaaagctgtggagcgtacagccttgtcggaagatgaacaaaaaatggaagtagactgttggcaggaagatggtagctttgccaaacgtaatccattgggacattggtttcttaacttcccgaacggaaagccgtttatagtaaatagcacttattatttgtatgctatcccgcaaaaagaaattaatgctaatcctaacatataaatagctctcttaattttttgactttgaccttaacttgtgagtcggcatgcatcgtgaggatgcgtgccgactattttctatattgaggatattattttatattttctgtttcttcaaattaggcagaaagaacgtgactaatcccagcaacggcatataagcacagatattgtaaacatactcaatgctcgtcttatccgctaagttgccaagcacagccgatgcaacgccggcaactccgaaagcaaatccaaagaacagtcctgatattaatccgagcttggtcggaagcaactcttgtgcataaagtaatatggcgggaaaagcggaagaaagcatcaatcctacgcagaaactaagaataatagtccataccagattagcgtgaggcattaataaactgaacggggcagctcccaaaattgaggcccaaataacatattttctaccgacacggtcgcccacaggaccgccaatcaatgtcccgatagcagtagcaactaagaatatgaataaatatagctgtgattcctgtaccgtaacattgaatttgtgaatcagataaaatgtataataactggtcagacttgccatatagatatattttgagaaaatcaatatcaataatataccgatagaaatagccgttttatccattggtaaagggaggtggaccggctttctgatgctgaccgtctgagccttcatccgattgagataagacttataccatttacatatcggatacatgacggcaattgctgccaatgcgacaaatgcgaatataagaaggtgttgtcttccatagggagctaccagtaaagctactagtaaagggcctaatgaaccgccaaaattaccacccacctgaaagagtgactgtgccaatccgcgtttcccgcccgaagcaaggaatgtgatgcgcgaggcttccgggtgcaatacggaagaaccgattccgattaagaatacagacaataatatccaataaagattatcagaaaaagctaagtttatcagccctatcatagtgaagctcattccgataggcaatgaccacgcgatgggatatttatcaaagataattcccgtaatcggctgaaaaaccgaagctgaaagttgataaaccaatgttatcagtccgatttgagcgaaactaagtcctaagtcatctttgaatagaggataagaggccgataaaaccgattgtaaaaggtcattgaggcaatgtgagagactcaatgcgattaaaatggagaatgtaatttttcctacgggttgttcctgattctgtaccataatacctgttctttagagatgttcctgaaaaattggctgcaaaggtacgcaaacttcccgtttctcaatatatttgctacgattaattctatatgatatgaagaaagtagtgctggcgatagattcttttaaaggttgtctgtcctcgattgaagcggataagactgccgagcagggtataaagatagtttgttcggatattgtgaagtcatttctttggcagaccctttttttacttcaagagaatagtctctgataataaaaccctagaactaaggattgtaaattgtcgttaattcatttttgactgactgaaccattcgccacacctgctgttgttaaataaaaaaggaggatgatatgagctttatttggtatattattattggtattgtggccggattccttgcaggcaaaattatgcgcggcggaggttttggtcttgtaataaatttattacttggtattctaggaggtgtattaggcggttgggtatttgcccttttcggacttgcagcctcgggattgataggaagtttgataacttctacagtgggggctattcttgtattatggattgcttctttattctcaaaatccaaataggtattttatataatttatttttaatctaaaaaaactgaacttaattatggaatgtagacatggaaatttctggattggactcggaataggttctatccttggtgctgttgtttatcgtctttcacgtacagcaaaagctaaacaactggaaagtgaaatttatgacgctatccaccgcattggtcgtgatgctgaggtggcagcagcttgtgcagagaagaaagcaatgaatcttggattgaaagcggtagaaaccggagctgaaatagctgataaagtggcagcagaagctgataaagtcgctggaaaagcaaaagaaaaatgggaaaaataacattcccagaattggtaatcagttaacatctaattgattaccaatttcttttttaccattctatttgcttttatatacactgaatattttcatgtgttcgtgcacactttaccatttctctattctttctgtcttttttcagtgatcaaaagtctttcttttcttttctgtatccattctctggagtgctttttcttaatgtttttatcttttttcttatgtttaataacatgtatatgtttgttgtcgttgaggtaagtgtttgataattagttttatagttcgttttatgacttcatgtgtgtgcgcacacactattgcttaattcaataattcattttacttttgtcgacgaaaaacaagatacttattaagaatggacaaagaattctcaaatattcgtattgtagacatcgctaaaatggcgggtgtctctgtcggtacggtggatagagtcattcataatcgtggacgggtatctgaagaaaacaggaaaaaagtgcaggctattctggagatggttaattaccagcctaatctcatggcacgttcattggcgtctaagaaacagtatcactttattgcaatcaccccgtcttttgctcagggagagtattgggaagccatttcggaaggcattgataaggctgcatccgaaatggggtcttataatataactatcacgaaactcttttttgaccagtatgacaacaaaacttttgatgatatagttcgcaatctgttggacaagaaggtggacggtgtgttaattgccacattgtttaccgattcagttatccggctttcgcgggaactcgaccgattcgaaattccctatatttatgttgattccaatattgagggacaacatcaactagcctatttcggtacagaatcttatgatgccggagttattgccgccaggttgctgacagatagaatctctcccgcttccgatattctcatggcacggattatccatagcggaaagaatgactctaatcagggaagaaaccgtagagagggattttgccgttacctaaaagaaatgagattcaccggaagtctgcatgaagtggagttgaaaatcaatgactcggtatacaatttcacaaaacttgatgaaatctttgaatcaaatccgaatatcgaaggagctgttattttcaattctacctgctatattttgggaaattacctgaaagcaagagccatgcaatcggtaaaactggtagggtatgaccttatcgagagaaatacgcagttactttcggaaggagtgattaccgcattggttgcacagcgtcccgaacggcagggatatgaaggaattaaatccttatgcaatcatctgttgttcaagcaacattctgaaatggtaaatctgatgccgatagatattctcctgaaagagaatctgaaatattatctgaacaataagctataaacatataaattttttagaaaccatgaatgaattatttaacgtaaaggacaaagttgttgtaattaccggtggagccggaatcttaggtaaaggaattgctgcatacctcgcaaaagaaggtgcaaaagttgttgtgctcgatagaagcgaagaagcaggaaaagcattggtagacagcatcaaagctgagggcaacgaagctatgttcctttatactgatgtaatggacaaagaagtattggaaggcaacaaagtggaaattatgaaagcttatggccgcattgatgtactgctgaacgctgccggtggtaacatggcaggtgcaacaatcgcgccggacaagactttcttcgacttgcagattgacgctttcaaaaaggtagtagacctgaacctgttcggtacagtgttacctacaatggtatttgctgagatcatggtagaacagaagaaaggctctatcgtaaacttctgctctgaatcagctcttcgtccgttgacccgtgtagtaggatacggtgcggcaaaagctgctatcgccaactttactaaatatatggctggtgaactggctctgaaattcggtaacggcttgcgcgtaaacgctatcgctccgggctttttcctgacagaacaaaaccgtacattattaactaatcctgatggttctttgactgaccgttcaaagacaatccttgctcatactccgttcaaccgtttcggcgaaccggaagatctttatggaacaatccattatctgattagtgatgcttctaacttcgtaacaggtacagtagctgttatcgatggtggtttcgacgcattctctatctaatttatttcaatcataatcagtaatctataaataacagctatatatgtatttatgtgaacaaacttggcgctggtatggtcctaacgacccggtaagcttgtgggatattaaacaagccggcgctaccggtatagtaaacgcgcttcatcatattccaaatggtgaagtatggacagtagaagaaatcatgaagcgtaagcaaatgattgaagaggtaggtctgacatggtctgttgtagaaagtgtacctgtgcacgaacatatcaagacacagacaggcgacttcatgaaatatatcgagaactataaggaaagtatccgtaacctggcaaaatgtggcgtaatggtagttacttacaactttatgcctgtattggactggacacgtactgatcttgcctatacactgcccgacggctctaaagcgcttcgttttgaaaaagcggcttttgtagctttcgaccttttcatcttgaaacgtccgaacgcagaaaaagactatactcctgaagaaatagccaaagcgaaagctcgctttgaacagatgagcgaagacgataagaatctcttggttcgtaacatgattgccggacttccgggctctgaagaaagtttcacagtagaacaatttcaggaagcgctcgaccgttacaatgacattgacgctgaaaaacttcgttccaacctgattttcttcctgaaagaaattgctcccgttgccgatgaagtaggagtgaagctggtgattcacccggatgaccctccttatacaatcttaggtctgccgcgtatcctgagtacagaagaagacttcaaaaaactgattgaagccgtacctaacgaatccaacggtctttgcctgtgtacaggctctttcggtgtacgtgctgataatgaccttgccggtatgatggaacgtttcggtgatcgtgtaaactttgtacatttgcgtagtacacagcgtgatgaagaaggcaatttctacgaagcaaaccatttggaaggaaacgtagatatgtacaatgtaatgaaagctcttattcttctgcaacaacgtcgcaaatgctctatcgctatgcgtcccgaccacgggcatcagatgattgatgatttgaagaagaagacaaatccggggtattcttgtttaggacgccttcgcggattggcagaacttcgcggtttggaaatgggcatcgctaagtctatcctttaatttgagtacataattagcattttattatagaagcactacggctattattgattgagataatagttgtagtgttttttatttggtctttttcactgttaccgtttgaggaatgagtgaatcgaataagtctccgacgtgcgtatctttatttgcttttttcgctggcttcgcttttttcggttcaggaataattagtaatgcaatttgggcgcaggcttctgcgtcagcaagtgcgtggtggtgattctccaagttatatccgcatcgttctgctactgtatgcaactgatgattgggcagatcctttccgaacactttccttgaagtacggcaggtacaataaaacttgtaattaggataagtcataccatataattcgtgaacagcacggaggcaaccttcatcaaaagggctattgtgagctacaagcggaagtccttccagcaatggcttgatttccgcccatacttctggaaaatcatccgcttccatagtgtcatcgtaggtaagtccgtggatagctgttgtccattgagtataatagttgggtgcaggacgaatcagacgatagattttattcacaatcttaccgccttttacgatgacaataccgacactgcatacactggtacgcttgccattggcagtttcaaagtcgattgctgcaaagtctttcattagtccgttgttttttgaatacaaatgtattgaattagaatttattctctctatatttgcctgtaaaatatatcaatgtatacagaatatcagccttctcatttgcttgctccctatattgacaactattgggaatttaaaggtaacccggaatatggtatgcgcatccatattctgccggatggttgtaccgattttatttttacgcttggagaagtcgcagatacagtggaggaagaaagcttgattatgcaaccttatcgttcgtactttgtggggccgatgacgaaatattccgaactgattacatattccgaatcggttcatatgtttggtgttcgttttttgccttgcggattgtcctgttttacaaagttgcctttacatgaatttgtaaatgatagaatcagtacaagggaaatgaaagcagtttttgatgatacttttgttgaaaggctatgcgagcaagaacatataggcgaccggatacggatagtagaagaatatttgttgtcgtatctgtctcgtcattatgagtctgccgattctcatattgttgtggcggtggatataatcaatcagttcggaggaaaacgtcctgttcgtagtttgatcgatgaggtctgtttgtgtcagcgccattttgaacggaagttcaagtattataccggatttactccgaaagaatacagccgtattgtcaaattcaagaatgccgtagaattgttaaggaatacaacatctcccaatttattgactacggcagtgaatgcgggatattatgacttggcgcatttctcaaaagagattaagacattatcgggtagcactcctgcctcatttctttcgattacaataccggatgatacgacgttgacctatatcgaaccgcaaaagtaggtttgtaaaagtcgattttttacaatagaacagaggtttatgccattatctttgcaggtataatataaatccaataagattatgtcaacaaaaacaatgaaagagaaagcaaccgagttgttgcagagatgtgaagttgtagtgcttgcttctgtaaacaaagagggatatccccgtcctgtgccgatgagcaagattgcaacagagggaatttctactatttggatgtctaccggagcggactcattaaaaactatcgactttcgtaagaacccgaaagccggattatgctttcaggataagggagacagcgtagccttaacgggaactgtagaagtggtaacggacgagaaaatgaaaaaggaactttggcaggactggtttatcgagcattgccccggtggccctaccgacccgggctatgtactgctgaaatttgaatcgaatcacgcgacttattggattgaagggacatttattcataagaaactggactagtccttcatacatttttattcccgtgggatatggaaatataaaaagagagaaacattctttccttccgaagaagaatgtctctctctttctgatgatagttggatagatagtatatctattctccgtgtttcatttagaattcgaacttctctagtttcatttcagctaattcctgaatgatacctacatatttgccgaaatgcggagacttctcgtgagctgccaatacctcagcgttctgccatgtttcacaaatcatgaaaacgtcgtgacgggtactgctttcgaaagtatcataagcaatgcatccttcttcctttaaagagcaagtagtcagttccttagctgcttcaatcgctttttcgcggtttgtctcgcttacgcggacgaaaacattcaatctaatcatagtctttattattaaatgattaaaaatagctttatcacatcttggtgaataaatcgcaggcaaagatactatttttgtgctttgtcggatagcttgttctttaaatttcatcaaaacgtcatataatcatcaaaaaaacgattatatttattctggaatcaaaaagcaactattttggacgcaactcttaatttttttctggcttaatattagcctcacgaaccacaggctaatttctttcgtttgagtaattccactcgagccgtttttcattttgttatttactgcatagtttctcttcttttgggcaaacagccttataagtataaagtaaagaaaggagatgttattttgatacatagaaagtgcttgtttgatattttagaatgaagttcgtaatatggattttttttatagctttgtgaactgatggcatataaacctcaaatccgcaactacgcgcctaatatgatacagaagcgaaaagaatctgcatcgttagtaaaaagggggcacagtgcatcgaatgtcaccataaagacatataaatgccccttaccccaccatgcgacttgaggcaatacgcaaaatcacgactataagttgtcggtgttatccaaagtcattctggaacacattggcataagcattgttgcatgaatagatattcagcacatacttccttgatgtcctgacccatttggctggcacagagatgaacttaaagacaaacgtcttgatgcggcttgttgctttgagtccgaacctcttcacgtcaagcctcgccatgatgaatttatagaagttgcgtatgagtgccataagcagaagaaacaccgtgttttctcccataaaggattttggaagcctgttccagccgaatccgttattcatatcatcgaagatgcgttccttccctccacggaggttatagaattcgacaatctctttctcggaagactcgtagtcatttgtaaggatgcagcggtaggtgtattctccttcccacaggtcgagttcgccgtctatccgcttctgtctttgaatcacaagacggtatgccttccctttccatttctcgatgagaatggaggccagctcaaactcaatgccgcccaattccactttcttccaacctctgagggcaaagatgtcattgtagagcgaactgcatcggttagcacggatatagaaggtcttgcagtgtttagcaatctcttccactatctcttcagaacacgagccgcaatcagctctgaaacggttgataataagcttgttttgttcaaacctttcaaagaacctcttcagcgtgtccttctggtggaaacggacatttgtgttgccgtcgctgttctcaatgccgacaatcaagttgccaataaccgccacgccagggcgataaccaaggaacttcttgtatgtaggcttcgcatcaaacttctcagcctctatgaactggtggtcgaagtcaacgtcatacccctcgccctctttcagctgccctgtggacaataggcaattgaggagcagtgtattcagcttgtctgccgtgttgaagtcgtaggtcttgccagtgtcggatgtgtaggaaatgttatcctgggtcagttcctttatggctctaagaatcgtgtcggcactgcatgtgcgaagtgtcggatgaagcgaaaggtggtacatcagatgagtggtgacatcctcgatgcatgagccgccacaaaaataaacgctcataagcgaacggatgatttcgctgtattgataaccatacagcctgcatctcataccgagggttgagtcgattacagatgagagtctggagtcaaattgctccattattgaaaatattcctccaaaaggagtgagtttctcggatttaattgctacctttgccatgtctgtcgggtttgatacatattttgatttgcaacactaagataggtgaaaaatctgacatggcaaattcctgagcaactttttgttgctcaggtacttaaaaagttatatttgtaatagtgttgcggaattaaggataaaaagtaataacaccctaataatcgaagatatgagaaaagtatttttattggcttttgccttgttcgcatggaatatccttgccaatgctcaggaaagtgatgaaagatatattgaagtgaccggttcttcggagatagaagtcgtcccggacgaaatacactttctgattcagataaaggaatactgggaagaagaatatacgggtaaatcaaagaaagaggaagattttcggacgaaagtgccgttgactgtgatagagaaagatttgcgtaaaagtttgcgtaaaataggaatatcggatgaggctatccgtacgcaggaagtaggggactattggcgtcagagagggaaggaattcctgattggcaaacaactggatattcgtcttacggatttcgagcaaatcaattccattatccggtctgtcaatacatggggaattgaatcaatgcgtatcggggaactgaaacataaggacttgccgatgtataggaagcagggaaagattgaagcattgaaagcagcccgtgagaaagcatcctatctggtggcagcaatgggacagcaattgggtgaagtcattcgtatcatcgaacctgccgataacaatataagccgttaccttcctttccaggcacagagcaatgtcagcatggggacggcggctaccgaacagtaccgtgtcatcaagctgagatatgaaatgaccgcccgttttgccataaaataaaaaatgcctattttggggtataagaaaaccggattcctgcaaatcatcgaacctaagattatcatccgtaaggcgggtagaaacaatgcgtatataactgctgttttggataaaagccgttcggttgctcaggcgaagcgtgaggaactgaagttgaaattctcctaatctggtagtcgcttggatgaactctgcttatccgatgaagatatcagagaagatcggagtggcatacaatccttctttctttggatacataagctatcgaaaagtaccagaataaactggatgcgaaaaccaccgtcggcgaactgttgactgtcaatgcgcagccgcagagattgaagttggttgatacaccggaagcggacgaagtatatatccgtgaatgggcattgaatactgctgccgtgactagagcgggaaggaatgtgttttatgtatggaaacaggaagaatgagatgatttaaaaatagtttttcagaggtaatttcagaaaaggaatattgtctgataacacatattaagcctgataatttgtcagttctctttcatacccctatatttgttcccgctattctatataatcaatagagggagaatgtatcataagagaaaaacaagagcgtacatagcatgggtgttgttcatgacattcattccgttctttgtagtgaagacctttcactatcatggaagcgaggatgaaaagtcatgttctcatgccgggcattctcacaaatcatccgaagattgtgcgatatgccaatactccctttctttctttactgaacctcaaccggtagaatttcattgtacattaacgctcgtgccttacgagccggttgtttatcaggataaggtcgtttgcaaacggacttattcacatcaattgcgtgcaccccctgttgcataattacataatcaaacttttcaagaaggcgggcttatcgtaacctgtcctcacattcattttacacattatataaaagattgtaattgatgcgtatcggaattatttcgggcgtattggggctgactgtagtcttacccgcccacgcacagaagtccgattcaatcaagagtttacttttgcctgatgtcgttgtgactgagtcgtaccagcaacgtcaagccaaaaagtctgcgcttgcggttgatgtagtggatcaggattttctgcgcaaacattttacgggaaacttcatgcaagcaatggagaacatccccggcgtgcaagcaatggatataggttccggcttctccaaaccgatgatccgaggaatgggattcaaccggattgctgtactcgaaaacggaatcaagcaggaaggacaacaatggggagccgaccacggactggaactggatgctttcaatatcggaactgtcaatgtcctgaaaggtccttcttcactactatatggcagtgatgcaatgggaggggtgattgacataacttcacctcccgtaccctcggtagatatgttattcggagacgttacacttctgggaaagtccgtcaacggaacgctcggaggatcatttatgctgggaataaagaagagtttctggtatgcacaagtccgttattccgaacagcatttcggggattaccgcatccctacggatactattgtttacctgacgcaaaaaatgcctgtttacgggcgtaagctaaagaatacggcaggcattgaacgcaatatcggattcttcgcccaatatcaacggcaaagatataaagcgaactattccgtaagtaacgtctaccaaaaaactggtttctttccgggggcgcatggtataccggatgcatcccgcgtagaagatgacggggacagccgtaacatggaattgccttacagcaaggtgaatcatctgaaggtgactacccttcagcagtatgcgtgggagaagctagttttgtcgggcgactttggattccagaataatcaccgtgaagaatggagtgttttccatacccattacggttcgcaacccgtaccggagaaagacccggacaaggaactggctttcaacttgaatactctcagtgcatcggtaaaagtccgctttatcggttcttcttcgtgggaacatgcattgggttgggacggacagcatcaacggaacgatatttccggttattcattcttattgcctgaatactaccgttccaccaccggattgctttggcttacgacttataagcctaataatgttatctccgtcagcggaggaatgcggtatgactatggatatattcatatatcttcgcatgaagacgcctatcttgccgattatctccgaaaacagggatatgatgaagaacaggtagaacactataagtggaacagccatgcagtgaaaaagaaattcggtgattattcattctctctgggattggtatggacaccgtccgaacggcacatggtaaaagcaaacgtcggtcgtagcttccgtctgcccggtgcgaacgaactggcggctaacggtgtgcatcacgggaccttccggcatgaacagggagatgcaaatctgaaatcagaacagggatggcaaatggacgcttcttataacttacggtataacgggttttccatttccgtttctcccttcgtcagttggtttagtaactacatctttctgcgtcctacgggcgagtggtctgtcctgccgcatgccggacagatttatcgttacacaggagccgaggtgctgtttgccggaacggaagcaacgatagacattcactttctgcgtagtttcaattaccgtatttccggtgagtatgtttatacctacaactgcgacgagcatatcccgttaagtttttctcctccgtttagtatgcggaacacgttgacatggcagaggaaacaggttatgctttatgcagagtggcagtccatagcccggcaaaatcgcgtagatcgtaacgaagaccgtacaccgggtgcaaacctgttccatttaggcggttcgttgaatattcccattcgggggaatcaggcaatagaaataaccctgaccgcccggaatattttcaatacccgatattacaatcatcttagtttttacaggaaagtagaaatccccgaaccgggacacaacttccaattattaatcaaaattccatttaaaaaattactgtaatgagaactaaattatatctcccgataatcagccttttggcaatgtctgtttttgtatttatctcttgtgacgattcggatagtgataccactaagccggtgattgaactgcacgaacccgaagaagggcaagcgctgaaaataggaagtgaatacggcgtgcattttgaaatggatctgtcggacgacgtgatgttgaagtcgtatatgattgaaatacacagcaacttcgatcaccattcgcatggaaaaagcaggggggccggagaaaccatcgatttcagcttcaacaagtcttatgatatttccggaaagaaaacggcacatattcatcatcatgatattatgattccgaaggatgcaactccgggagattatcatttaatggtttattgcacggacgctgcaggaaacgagacgtatgttgcccgtaatatcgaattgagtaacgatgtagaagaagaatatcatcatcatgaatagaataaaggtattataagtaggtgcattgtaaaaaatgcgacctttgtaggtacaaaattggagaaagaaatttaaaggtgtaatagatattacacctttattgttttcaaagctttacttttgtgaaaaatacttttccctatgataaagttgccaattataaatcgaatttttccttcgtacaaatcgaagataatagctgtcattgttaccggcgttatcgtgggcggaggagttttatttatgtatatgcttcgggcacatacatatttgggagatgatccggcagcatgtgtgaattgccatatcatgtctccttattatgcaacctggtttcatagttcgcatgcccgggatgctacttgtaatgactgtcatgttcctcacgaaaacgcggtaaagaagtggacattcaaggggattgacggaatgaagcacgtagcggcgtttctcacgaaaagtgagccgcaggtgatacaggcacacgaagccagttcgcaagtgattatgaataactgtatccgttgccatacacaactgaatacggagtttgtgaagacgggaaagatagattatatgctgtcgcaagtaggagaaggaaaggcttgttgggattgtcaccgcgatgtccctcatggcgggaagaactcgctgtctacggctccgggagctattgtaccgcttcccgaatcgcccgtgccggaatggctccaaaaaatgatagataataaagaataagcaaaatataactacgtaataaaacaataaaaccgatatagaatggaaaagaaattaaaatcatggcaaggatggctgttgttcggaggctcaatggttgttgtttttgttttgggactatgcgtttctgcattaatggagaggcgggcggaagtaactagtatctttaataatcgcaagactgtcatcaaagggattgaagcacgcaacgaactctttaagaatgatttccctcgtgaatatcagacttgggtggaaactgcaaaaacagatttccaaagtgagtttaatggaaatgttgctgttgatgtactggaacaacgtcctaatatggtaatactttgggcgggatatgctttctcgaaagattattccactccgcgcggacatatgcatgctatcgaagatatcacggcttcgcttcgtaccggagcacctgtgaatcctaccgacggtcctcaaccgtctacttgctggacctgcaagagcccggatgttccccgtatgatggaagcattgggcgttgattctttctataacaataagtggggtgccatgggtgcggaaattgtgaacccgatcggttgttccgattgccacgatccggaaacgatgaatcttcatatcagccgtccggctttgattgaagcgttccaacgtcaaggcaaggatatcacaaaggttactccacaggaaatgcgttcgctcgtatgtgcgcaatgtcacgtagaatattacttcaagggtgacggcaaatacctgactttcccttgggataaaggctttactgtggaagatatggaagcctattatgatgaagccggtttttatgattatattcataaattgagccgtaccccgatcttgaaagcacagcatccggattacgaaattgctcaaatgggtattcacggtcagagaggtgtctcttgtgccgattgccacatgccttataagagtgaaggcggtgtgaagttcagcgaccaccatatccagagtccgttggcaatgattgaccgtacttgtcaggtctgtcaccgtgaaagcgaagaaacattgcgtaataacgtttatgaacgtcaacgcaaagcgaatgaaatccgtaaccgtttggagcaggagttggcaaaagcgcatatcgaagctaaatatgcctgggataatggggcgacagaagagcaaatgaaaaatgtgcttgctctgattcgtcaggcgcagtggcgttgggatttcggagtggcttcccacggaggtgcttttcatgcgccgcaggaaattcagagaatcctttctcatgggctcgatcgtgctatgcaggcccgtttagctgtatctaaggtgcttgcgaagaatggatttaccggagatgtgccgatgcctgatatttccactaaaggaaaggcacagcaatatatcggtctggatatcgacgcggaaaaagcggccaaggagagatttctgaaaacgactgttccggcttggttggagaaagcgaaatcaaatggtcgtctggcacaaaaataagatagtagtatatgtggagcaaaccgtggagctataaagaaggtctgattattggtgcaggattattggtgataggtgcactgctgcaaataacggtaggaggtatcaattggaatctgtttgcctggccggttaatttaatagtgttatcagtatatatcattgttctgatagccatgcaccttctccgtaaacgagtctatttgtttgggtggttgagccattattccgcagccgtttcttcccttgtctgggtggtcggtatgacggtggtaatgggtcttatccggcaggctccttccggtcatgcttcgaatgacatactgggattttcacagatgatttcatcctggtctttcgttctgctttatttatggatggccactgcattgggattaacgatactccgtaccagtttccctttgaagttcggccgcctttcgtttcttctcaatcatatcggattattcattgcattgattgcagctactttagggaatgccgatatgcagcgactgaaaatgactacccgaatgggaaacgcggaatggcgggctaccgatgataaaggacaactgacagaacttccgttggctatcgaattaaaagattttactattgatgaatatccgccgaaactgatgctgattgataatgaaaccggacgtgcacttcccgaaaaatctcctgtacatttattgcttgaagaagaagtatacggtgggactttgcaggattgggaactgactattcaacaatccattccaatggcggcctccgtagctaccgaggatacgctgaagtttacggattttcattctatgggagcaacttacgctgtacatttgaaagctgtgaaccgaaagaaccggcagacgaaggaaggctgggtgagttgtgggagttttcttttcccttataaggcattgcgccttgattctctgactagcctcgtaatgccggaaagagaaccgcaacgctttgcttcgaaagtgaaagtctatacgcaggagggaacaattacggaagatacgattgaagtgaaccgtcctatggagatagaaggctggaaaatctatcagcttagttatgatgagtcgaaagggggttggagtgatattagtatcttcgaactggttcgtgatccgtggttgccggtagtttatacagggatagttatgatgatgctcggggccgtttgtctgtttgtgaatgcacaaaagagaaaagaggaggaaaaggaatgagttgggaatattttatattgtttgcggtagtcgcattggtttgttggagcttgggggcttttgctgcttggaaaggaaagaaaacggtatgggcatacggatttactctgttgggattggctgtatttttctgttttatcctcggcatgtgggtttctttggaacgtcctccgatgcggacaatgggagagacacgtttgtggtattctttctttctgccgttggctggattgataacgtatatacgttggaagtataaatggattcttagtttcagttgcgttctgtcattagtctttatctgtatcaatatctttaagccggagattcacaacaagacgttaatgcctgctttacagagtccatggtttgctcctcatgttattgtgtatatgtttgcttatgctatgttgggggctgcggtggtaatggctatttatctgctttggttcaagaaagaagagattgaacggaaagaaatggatttatgcgataaccttacttatgtaggtctggcttttatgacattgggtatgcttacgggagctatttgggcaaaggaagcttggggacattactgggcttgggatccgaaagaaacatgggcagcggcaacttggttctcttatcttacatatatacatttccgactgggtaaaccgttgaaagtgcgtccggcattagttattttgttagtatcgtttgttttattacagatgtgctggtatggaatcaattatcttccgtcggcacaaggtgtcagtgtacacacttataatttgaattgaaatatcaaatcatttaaattgcaatattgatgaaaacattttattggtcattagtgcttatgatgctattgccaagcatggcatacacacaaaacacggagaaggaaaatgagttctcgatgtcgatgcaaatcagacctcgggcggagtatcggaacggagcttggtttcctcgcaatgaaggggtgaaagccgcatcgtctatcaacaatcgtgcccgtttgtcaattgactacaagcggtcggacttggaaatcaagatgtcggcacagcacgtcggagtttggggacaagatccgcagatcgacaagaacgggcgttttgtcctgaacgaagcatgggcaaaacttgatttcggacacggcctttttgcccagttggggcgtcaggcattggtttatgacgatgagcgtattttgggcggattggactggaatgtggcgggacgttatcatgacgcattgaaactgggatatgcgaataagaataatgaggtacaccttattcttgccttcaaccagaatgacgagaagaagataggcggtacttattatgcttccggtgcacagccttataagaatatgcagactgtatggtatcactataaggcggatgcaattccgttcggcgcttctttgctgtttatgaacctgggattggaaaccggggatgcggctacgcaggattcgcatacccgttatctgcaaacaatgggaacgtatcttacctataagcccggtagctggaatctggacggtgctttctactatcagacgggcaagaataaggatgctgagaaagtgtcggcattaatgggaagcgtgcaggttgcctatgcttttgacaagacatggggagttgtagcaagtttcgattatctgagtggcgataagggaaacggcgacaagtttaaagcgttcgaccctctctacggaacacaccataagttctacggaagtatggattatttctatgcgaatctatttgtgaacggttatgcaccgggtttaatggacagccgtatcggtggtcgttttcgtgcgtcggacaaagtggatatggagttgaattatcactatttcactactgcggttaaattgccggacttgaagaagtccttgggttcggaagtcgattatcaaatcaatttgtcggtgatgaaagacgtaaaactctctgccggatattctttcatgcgtggcacaaagacgatggatgtagtgaaaggcggcaatcataagagttggcaagactgggggtgggtatcgttgaatatcaatccgaaagtgtttttcacaaaatggtaattaaatagggatgacattctgacaagtgtggcgcagcataaaaccgaaagtttaagctgcgccacatttttattatatgaatttctctaaagctgctttgttcaggatttccacccgtttcccttccatggtgataagcccttccttgataatcttattaatttctttcgataaggcagggcgggatacattgaggtattcggcaagttgggattgcgtatgtgtaatctctactatcagggaatctttcttcttatgctcgaacagataaacaatgaatctttcccgaacagtcttgcgggagaggggtttcagccgtgatacggtacaaatgttgcaattaccggcaatgcagagaaagttgtgtaacacttgcgggtcttggctgataactttaaacgtagaatctttggttgccataagtatcacactgtcttcaagggcggtgaacgtggcaggcagtgtattgtttggattaaaaagatgtggagtggcaaaagtgcgtggcgcaatgatatattcaatcatcacttcgtttcccagtccgtcgataatatccgtgcgtaatttcccttccaacaacacatacagtttgttacaaggcgttccttgtgtgacgactatctcttttttgtctgctgcgtagattacgaaatccagtttttctaataaagattcttttatattcaagggcaaatcccggaaaagagggatttgaaacagtttttctttatgtgtgtcggtcagttgtatttttttcattgcatcatgttgttcgtatcgtggacaaacttacggaaaatctctggaataaacgaataaaaagggagaaatggcattaaatggttaggatacaaaattgtctttggagaaagagatgactattgaaattgtcttctgtatttggacggagacattcccaaggtatttgtgaaaactcggacgaaatggggcaaatcattaaaaccgaccgtaaaacaaatttcggatacttgcttttgtgaatgtttaagaagttcgcaggctgtatttaagcgatattgggttacatactgcgagaaggtcattcctttgcaacgtttgaagtaggaacagaaagcagagcggttcatgcctacttctgcggcaatatcatccaaaaatatggtatggatatagtgggccattacataaacacagatttgctgcatacgtctcacgtcacgttcaatactcatgggctttccggcaaaggtatggtcggatgaagtaaatatggcaggtagcagacgaaacatttcgcataggcgtcccaactcgtccatatcgttcatttgtgacaatatccgacgaatggtttgtgaacttccagtaccgaatttcagtgcgttcgtcgggaatgtaatgcccgtcagacgattacgcagttcgggaaatactgccatacaccgttctacaagcgaatgactgaaagctaccattaaataacggacatgcccgtcatcgtctgccgaatccggtgaatattcccagcggtgtagcatggacggtggtattaacgctacgtcgcctgctgcgaaaggttgcaatgtgtcacctgccattcgtttaccatatccgtggacaacataatacaactcccatgcatcatgccggtgcagtttggcttcgatgcttgttgtcactcgttggtctataaagaaaaaagagtgattctccacttcgggtaattcataaggaatggcggtatcttccataagagtaatgtttaaaatgacttatgtgcaaatatacgacaaatatctaagatgataccacaaatatataacaagaaagctgggtaactttgctgccggaaacaataagtataactattaaaatgtattgttatggatttctatcaagtactagagaaaagaagaactattcgcgacttttccgataagaaggtgacggacgaagtactggaaaaggtgctgttggctgcattcaaagctccgaccaatgaccatttgcggcagtttgagtttattgtcgtgagagggcaggaaaacattgcccgactcatatcgcctgtggcggaaaacacaaggaacattcaacaggcagggcttgatgctgctgccgacatgatggataaggatgaacacgccatgtttgtcgatgcgttgcccaaacaacaacgtatgcttatacaaagtaattgtctcgtacttccattttttcggcaaaaggattttcctctgtgccaacctgccgaccaaagttcactcaactatttcgcttctgcatgggcagccgttgagaatatcctgttagcagcaacggcggaaggactggcgtgtgcattccgtattcctattggcaacgaaccggagtatgtgaaacatctcgtcaatgctcctgacggatatgagttcacctgtttcctcgctatcggctatgcagcggagaatgcacatatttgtaagcagaaagaaatccgggtaggggataggattcacaggaatgtctggtaatctgtaattaaggtacatctctctgtaatttatatacattcgctatgttataaattgcctatttttgcagagtgaaaagactgaatcattctaaaagataaaactaataaagtaaagttatggctaaaaaagttctgataatttcgtccagtccgcggaaaggcggcaattcggatttgctttgtgatgaatttatgaaaggtgctctcgaagcgggcaatgaagtggaaaagattgtattgaaagacaaaacggttcatccttgtacgggatgcagtgtttgtagtatgtacggcaagccttgtccgcagaaggatgatgcagcggaaatcgtggagaagatgattgctgccgatgtgattgtaatggcaactcctgtttatttctatacgatgtgcggacagatgaagattatgattgaccgttgctgcgcacgctatacggagataacgaacaaggagttttatttcattattgcggcggcagaggataataaggcaatgatggaacgtacaatagacggtttccgtggctttcttgattgtctggaagggccacaggaaaaaggaacggtctatggaatcggtgcttggaagataggagaaattaaagatactccatacatgcaggaagcctacaacatgggaaaattggtgtaattgtcaccggcttattatagtgacgctatgcttgccggatagtgacgctataacaacaagatagtgacgctatgacgactggatagtgacgctatgacgactggatagtgacgctatcttatatgaccttttaaagcataaaaatacgatttcagtcaatagattgaaaagtcaagaattttaattgcctggattgcttgttctgccacagaattattataattttgtggcagaactttttattttgtatgattcgtttaataactaagcattatgggctatacaataacgactcttgtagagaattgtgtttatggacgtaaattgcaggcagagcacggtctttctctatatattgagacatcggaacatagattgctcttcgatacaggagcgtccgatttgtttatccgtaatgcccgcctgctgcatattgacttgcagaaagtcgattatctgatattatcccacgggcacagtgaccacacgggaggtctgcgtcatttcttggagctgaacaaacaagcaacagttgtctgcaaacgcgaagccttctctccaaaatttaaggatgaacgcgaaaatggaatgaagcatacgcagactttcgacctttcccgtttccgttttatcgaagaacagaccgaactgcttcccagcgtatttctctttccctctattgatattatcgaccgtgaggatacccatttcgaacgctttcgggttcagaaagaagagggttgccatataccggatacttttcaggatgaattggcggtagtgttggtagagccggacggtttttctgtattgagcgcctgttctcatcggggaattacaaatatcctgcgaacagtccgtgcggcatttcccgaatctccttgtaacttactgttaggcggttttcatattcataacgcagaagaacggaaatatcagatcattgcagattatctgaaagaatatctgccgcgtcagattggtgtctgccattgtacaggagtagataaatatgctttcttctacaaagactttggtgacagggtattctataattacacgggaaaactaattcaaactgatttgttgaaataaaatatatataataatttgatatgaagaaactaataacttctttagcactggcattgaccgcattgtccggctatgccattactcctttgtggatgcgtgacgcacgtatttcaccgaatggaacggagattgtcttttgttataaaggcgatatttacaaagtccccgcacagggtgggacagccgttcagttgacagcacaagcatcttatgaagctaaccccgtttggtcgcccgacggaaaacaaattgcatttgccagcgaccggaatgggaatttcgacctctttatcatgcctgctgacggcggaaccgcccaaaggctgacttatcattccgcttcggagattccttcggcttttactccggacggaaagtttgtacttttctccgcatctattcaagaccccgcaggcagcgctttgtttcctaccggagcaatgacggaattgtataaagtacctgctggcggaggacgtaccgagcaagtactcgctactcctgccgaatgggtttgctttgataaatcggggaaaaactttctttatcaagaccgtaaaggcttcgaagatgaatggagaaaacaccatacttcttctataaccagagatatttggctgtataacacgcaatcgggaaaacataccaatctaacgaaccgggaaggggaagaccgcaatccggtgtatgcgcccgacggcaattctgtctattttcttagcgagcgcaacggcggctcattcaatgtttataacttttcactgaatacttcgcaaacgtcgaatgtgcctcaagaggtaaaagcgataactacattccgtacgcatccggtacgtttcttgtcaatcagtgataaaggtacattgtgttatacctatgacggagaactttatacacaggaagccaatgcccgtccgaagaaagtaagcgtcgaacttgtccgggatgatgaaaaggagattgcttccctcaaattttctcagggcgctacttccgcttccgtatctccggacggcaaacaggttgctttcattgtgcgtggtgatgtctttgtcacttcgacggattacactacaacaaagcaaatcacgaatactccgggaaaagaagccgctgtgtcctttgccccggataaccggacgctggtctatgccagtgaaaggacgggtaactggcaactttacaccgccaaaatagcccgtaaggaagaagccaatttccctaatgcaactcttatcgaggaagaagtcttgcttccttcaaaaacagtggaacgtgcttatccgcaatattctccggacggtaaggagctggcttttatcgaagaccgtaaccgcttaatggtacttgacttaaagacgaagaaagttcgtcaagtgacggacggttctacatggtataataccggaggcggattcgactatgaatggtcgccggacggcaaatggtttactcttgaatttattggcaatcgccatgatccttattcggatataggtattgtcagcgcacaaggcggtactattaccaacttgactaacagcggatatattagcggttctccgcgttgggtactggacggaaacgctattcttttccaaactgaacgttacggtatgcgtgcgcatgcttcttggggttcacaacaggatgtgatgttggtattcttgaatcaggatgcttatgaccgctatcgcttaagcaaggaagacttcgaactgctcaaagaattagaaaaggaacagaagaaagcgaaagacggtgacaagaagaaagatgtaaataagtctaaaaaggatgaagctgacgaggacaagtcatccgaagataaagcagacaagaaagatatagtagtagagcttaacggcattgaagaccgtatcgtccgtctgactcccaactcttccgatttaggcagtgccatactctcaaaagacggagagaatctttattacttctcagctttcgaaggcggctatgacctttggaaaatgaatcttcgtgaaaaagacacaaaacgtttgcacaaactcaataccggttgggcatcattgatgttggataagaaaggggacattttcttgttgggaagccggatgatgcagaaaatggatgcgaagtcggatgcattgaaatcaatcagttatcaggctgaaatgaaaatggacttggctgccgagcgtgaagcaatgttcgaccatgtgtacaagcaacatcaaaaacgcttctacaatcttactatgcatggggtcgattgggatgctatgacggctgcttaccgcaagttcctgcctcatattgacaacaactacgactttgcggaattattgagcgaatggttgggcgaactgaatgtttcgcatacaggaggacgttattctccgagaggcgggggagatgtgacctctaatctgggcttgttgttcgattggaattaccaggaaaaaggaatgaaaatcgctgaggtaatcgagaaaggcccgttcgaccattcccgtacaaaagtaaaagcaggctgcattattgaaaagattaacggtgaggaactggctccggataaggatattactgctttactgaataataaagccggaaagaaaaccctggtttcgttgtataatccgcagaataaggagcgttgggaagaagtggtaatgcctatcactagcggaagactcaacggtttgttatataaacgttgggtaaaacaacgtgctgccgatgttgagaaatggtcgaacggtcggttggggtatgtacatatccagtccatgggcgacggaagtttccgtactgtttactcggatattttgggtaaatataacaactgtgacggaattgtgattgatacccgtttcaatggcggcggtcgtctgcacgaagatatcgagatacttttcagcggtcagaaatactttacgcaggtagtacgcggacgcgaagcctgtgatatgccgagccgtcgctggaataaaccttctatcatgttgcagtgtgaagctaactattccaatgcgcacggtacgccttgggtgtacaaacaccagaagataggcaaactggtcggtatgcctgtgccgggaacaatgacaagcgtatcttgggaaacattgcaagacccttcactggtattcggtattcctattatcggttatcgtctgccggatggaagttatctggaaaatagccagttagagcctgatattaaggttgccaatagccctgaaacggtagtgaaaggggaagatctgcaactgaaaacggctgttgacgaattgcttaaagagatagacagtcagaatagatagtaaatagaagtaggttgatgcatatcccccgttacggaagtgcatcaacctacatgaatatataatgaactggttaggacttctttagccgataatctttctgatatcttctacaatcagttcatctgtcagatgattggcacgaagtaactcttgtatgtcgtaccggtctacgaattctttcttcgctccataattaaggactttcatatcactggcaccgtaataacgggcaatcttttcaccgaaaccaccgtccaacacaccgtcttccaatgtaatcactagttggtggtcggctttcagctcttccattagctcattgtcaatgccggtgatatatcggggattgataagcgttgcatcaatacctgccttttctttcagcaatgacagcaccgactgtcctaatccgaagaacgaacctaacgcaaggatagctactttcgaaccgcgatgagcgactttataacgattgagaacgctgtaatcggattccacagactcgccacagctaatcacatctgttgcgggcacacggatagccaccgggtgttcattctgacggataccccattccagcatggcaagatattcctctttacaggttggcgctaaatagaccatattcggaatattactgataagcggaatatcgaagaaacagagatgagttacatcattcataccggataatgttccccaaaataccaagaggactgccggattattattgatgcagaggtcttgcgatagctggtcgtaagatcgttggataaatgtgctatataccccataaacaggctttcccccattagcggcaataccggaagcaagtgccactgcatgttcttcggcaataccgacatcaacaaactgcttgccggcttcctgacgacggtcgggagtaaatccgagaacggcaggagtgccggaagtgattgttaccacccgcttgtcttctttcatctttttcagcagatattgagcggttacttcgctataatcttccacagtttcgccaaacttggattctccggtttctatattgaacggagtacgccaatggtaagtctctttgtccagttctgcgcgttcataccctttgcctttcagggtattaatatgtactactatcggatgctgaatatctttcactttagagaaagcctcaaccaatgcttccacattattgccgtcgttcacgtacatataatccaatcccatagccttgaagaaattacattcgcactgaccgttgctgtcacgcaaatctttcaggttcttgtaaagaccaccgtgattctcggcaatagacatttgattgtcgttgacaataataatcatgtttgtaccaagctccgccacatagtccaatccttcgaatgcttcaccgccacttaaagatccgtcgcctatcacggctatgatattctcattaccgccggtcaggtcgcgtcctttcgccaatccgctagccagactgacggaagtggaagtgtgaccgataacaaaaaaatcatgcttactttcgtgtggttcggaataacccgatacattgtcatactctgccggatagaggaaagcatctttccgtccggtcagcatcttatgcacataactttgatgcgatacatcaaaaacaatcttgtcttccggtgaattgaatacataatgtaaagcaatagtcgcttccaccattccgaaattaggcccgaaatgcccgccgtgttcactcaatttttgcaggagtgatgcacggatttcattacttaaatcattgagctcattaaacgataacttttttacgtctgcaggagagtcaatattttctaaatacatatcaatttgtttttttacgtttatacctgttgtttttatcacactgcaaagatactgctgattttagattcggtttgtatatagattacggattattttacctatattaccgaccttggaaaatgagactggtaataaacataaaaatagtagataatagacattggagggcaacatatatgaatagtgattataaagtgggtgatttaatttatgatgcaaatatttatgatgcaatgaataccaatctagatgatttgcatttttataagcggtggttgccggaaaacaaggatgcgcagatacttgaactttgttgtggtacaggcagacttactcttcccattgcaaaggaaggatatgatattactggagttgattacaccccttcaatgcttgcccaggcaaaggtgaaagcttccgaagcaggattagaaataagttttatcgaggcagatatcagaattttgaatttgccggaaaaatacgaccttatctttattccgtttaattcgattcatcatttatataagaatgaagatttatttaaggtacttagtgtcgttaagaatcacctcaaagacggcggcttatttctgtttgattgttttaatccaaatatccaatatatagttgaaggtgaaaaagagcagaaggaaattgccgcatatacaaccgatgacggtagagaagtattgataaagcagaccatgcgatatgaaaataaaactcagataaaccgtatcgaatggcattattttatcaatggcaagtttaattctattcaaaatctggatatgagaatgttctttcctcaagagctggattcatatttggaatggaatggttttcatattattcataagtatggtggatttgaagaagaggcatttaatgataattcggcaaaacagatatttgtttgccagtgttagtccggatattgaggctctattgagtctagtttcaatattttctcttttatgtaaaaatctggtttctatattcgttaggagtacagccgacacgcttcttgaataaccggcagaggtgttgcggatactggaatcctaatgcgtatgctatttggctcactgtttcttccgtatcggcaatatgctcctttgcaagttcaataaccttagtctgaatatgttcttgtggggtttttcctgtttcttttttcaccatatcaccgaagtagttggaagaaaggcagattttgtcggcaaagtacttcactgaaggtaatccgttctgcatcggaagctgactttggaaatattcatccagcagttgctcaaacctcgtcagagcgtccttattgacattgctccgcgtgataaactgccgttcgtaaaaacgcatgcagtaattcagcaacaactcgatattcatggcaattagaactttgctatgcttgtcaataccgtgttccagttctatgctgattttcttcaggcagtccattacgatttctttctcttgttctgacaggtgcaacgcttcattcacagcatacgaaaagaaggtatactgtttaatctcctttccaagagaagtgccgcgaatcaggtcgggatgaaaaataatgccgtaaacgggaggactgacttcatcttccgtagtttcgacacctgccgtctgaccgggaccgaaacatacaatagtgccttcctgataatcataatattgtcgtccatatttaatgtcacaacttttggtttctttcaggaagagtgcgtaaagaccataattcatttggatatggttgacagatttagtcgctttggtcaggtcaacgatactgaccagcgggtgcaatgtctcaagtccgtataagttgttatactggtctacattctctaattttataactttctccatagctgttattagttgaaccgtaacaaagatacacataaaaaaaatatcttcatagagggaaaataacgaatctgtaattggggttatcatctccgtaatttgtctacaatcgcttcactttattctcccgacctttgtaacgtcgaataggactctatacctcatgtgtgtatggaattaaattaatagagaatatggacagaaaaagttttttgaaaaattcgttggtcgcaacaggaagtttgctgttgggcggtgcggctatctaccggtttctgaatgacaaagaaccggcagaaaacccgcttccacggacgatagaaaaaatacatcagggagatatgaaaaagatacttgtcataatgagcgcaggaacaaaactcggcaatacagaccggctgaccgatgcatacattaaaggattggtagagcgcggacattctgtgacgaaggtttatttgggcagtatgcggatagaagggtgcaggggatgtggagtgtgtcagcgtctcgctcatcagtgcgctgtccgcgacggtatgcaggatatatatcccttgtttgctgaatgtgatacagtagtaatggcttcacccctttacttttggacaatcacagcgcagttgaaatcattcatagacaggctttatgccatttcagtcgatgacaagtatcctcaaaaagactcggtattgctgatgacagccggtgacgataatgatacgaccttcgagcagccgaaacgatatttccgtcttctcaaccaagcgttaggctggaatgaagttgggatatattgtgccggtggttgtaccggatgcgagaaactggcacggcagattgacaaagaacatcttgaaaacgcctataaactgggactggaattataaattacatatagtaaccatggaacaaaagaataaattaaaactcaattcgggcggtttgctcgtctttatccttacggtcggtgtgtttggcattataaacaccgagatgggggtagtgggtatcctgcccttgattgccgaagcttttaatgtctccgtaccgcaggccggctggacggtaagtgtttttgcattggtggtagctgcttcggctccagtcactcctttgttattttcaggaattaaccggaagaaagtaatgctgcttgcactgggattatttacgctaagcaatatcatatccatgcttacctctaactttaccatattgctgattgcccggatacttcccgctttcctgcatccggtatatgtatctatggcttttacggtagctgctgcgtctgttagcaaagaacaggctcccaaggctgtttctaaagtctttatcggtgtgtccgccggcatggtgctgggcgttccggtgaccagtttcattgccagtgaagtttcgttctccatggcgatgttatttttcacagttgtgaatgctttggtatttgtggctactatactgtttatcccttccatgcctgtaaaagaaaaagtatcttacggtgcgcagctcagcgtattgaagaaaacggagatgtggcattcaatcattgccgtaaccttgattaacggagccatgttcggattcttcagctatatgtcagactatctgaaaacagtgacggaagtttcctacaatgtaatcagtgtcgtcttgcttgtatatggactggcgaatattgtaggcaatgtgctggcggggaaactgctttcgataaatgccagacgctcaataatcatcatgccttttgcactgttagcttcctatatctgcctgttcttcgtcggagaatggataacagctatggtaataatcatccttattttaggtgtattggcaggtatcgcaagtaataatatgcaatacatgataacagattccgcacccgaagctcccgattttgccaatggaatgtttttgacttccgctaatttgggaacgacgattggtacggctatatgcggagcttttatcacggaaatgggtacccgctattctgttttcggcgcgtttcttttcctgattgcaagcattgtgttcgtttatttacgtgttcgtatgcctcattcccgcaaacaggttaaaatggatattttagcagaatgatgaaaaaaacagaatctgtaattcgggtaataatgtcagtaattcatctacatacagtctctttatttcaccctatttttgcaacgtagaaaatagataatcaattatttaattattaaaacgcaagagatatgaaacggattttattattaacagctgtatttattatgatgctcggaactaatttttcttctgcacagacagatgcagataacttttataaaagtgatttggtaagtgtgaagaaagtttctttttccaaccagtataaaatgaaggtagccggaaatctgtttctgcctaagaacatgaaagaaggagacagataccctgcaatcattgtcggacaccctatgggagcagtcaaggaacagagtgcgaacctttacgcaactaaaatggcggagcggggttttgtcacactctccatagacctttctttttggggtgggagcgaaggtgagccgcgtaatgccgttctgccggaagtttatgcggaagactttagcgctgcggtagattttctcggtacacgtccgtttgtcgaccggaatctaattggtgtaatcggtatttgcggcagtggaagtttcgctatcagtgcggcaaaaatagatcctcgtctcaaagccattgtaacaatcagcatgtataatatgggtactgccagtcgtaatggattgaaacatgcattgaccctggagcagagaaaacaaattatggcggaagcggcagagcagcgttatgttgaattcctaggtggagaaacaaaatacacaggtggtacagtgcatgaactgacagaaaaatccggcccgatagaacgtgaattttatgaattctaccgtacacaaagaggagaattcacaccagaaggagcaactcctttgacaacaactcatccaaccctttcaagtaatgtgaaatttatgaatttctatcctttcgcagatattgaaacgatttcaccccgtcccatgcttttcattaccggagaaaatgcccattcgcgtgaattcagcgaggatgcctatcgactggctgccgagcctaaagaactgtatatagtgcccggtgcaggacacgtagacctttacgaccgtgtaagccttataccattcagcaaactggaatctttcttcaaggagtatctgaagaaataagtagttttcttgtgataacaggaaatgtaaatgtgacttttgaaataacagactaaaaaataaactaatggaacaaataagaaatcaagaatacggaggcgaacgtcctctgttcgcaacccacgaccttcaactggaagatgtgacgattcacgctggtgaatccgcactgaaagaatgtagtaacatcatagcaatcaactgtcgctttgaaggaaaatatcccttttggcataccaatggatttatagtgaagaactgtctctttacagaaggcgcccgtgccgcgctgtggtattcccaaagtctgcaaatggcagataccttggtagaagccccgaagatgtttcgcgaaatggacgggataaaactcgaaaatgtacagttgcccaacgctttggaaacattttggtattgccgtaatatagatttgaagaacgtgcagatagacaaagctgattatctttttatacatagcgagaatatcaagatacagcactacgctcaaaatggaaactattcattccagtactgtaagaacgtggaaatccgtaatgcggttatcaactccaaagatgcattctggaatacggagaatgtaactgtctatgattccgaactgaacggagaatatctgggctggcattctaaaaacttgcgtctggtaaattgcaggatttcgggcacacagccactttgctatgcacatgatctggtcatggaaaattgtacaatggcggaggacgctgacctcgcttttgaacacagcagtgtgaaagcaacgattaaaagcccgattcacagcgtgaagaatccccgcacggggagcattattgccgaaagtttcgggacaatcatcctggacgagaatctcaaagcaccgggaaattgtgaattgaaactttgggacgaactgacttgttttgattgaaatatgaagtacgacttcgatgaaataattccacgccgaggtacgaattcctataaatgggattctgccagagatgcagatatattgccgatgtgggtagccgatatggatttccgtacggctccccctgttgtggaagcgttgaggaaacgggtggagcatggtatcttcggatatgtccgtgtaccggatgcatactacgcggcggtgacaaactggtttgcaaggcgacatgactggcagatagaaaaagaatggattatttataccacgggagtagtaccggcattgtctgctgtcattaaggcactgacagtccccggagataaagtaatggtacagacacccgtatataactgctttttttcctctatccgcaataacggatgcgggatgattgccaatccgctgatttatagaaatggaacctatcagatagattttgcggatttggaacaaaaagctgccgacccaaatgtaaaggttctattgttatgcaacccgcataatcctgccggaagggtatggacaaaacaggaacttacccgcatcggtgacatctgtatccgaaacaatgtgtgggtagtagcagacgaaatccattgcgaacttgtctttccgggacacacctatattccttttgcttctatctcacaagaattcctgatgcactccgtcacttgtacctcgcccagcaaagcctttaacctggcagggcttcagattgctaatatcatttctgccgatacggatatacgaacgaaaatagataaagcaatcaatgtcaatgaaatttgtgatgtgaacccgttcggggtggaagcgttaatggcagcctataacgacagtgaggaatggttggaagagctgaaacaatacctgttcgccaattacaattatttgagggcatacttcgctgaatatctttctgaatttccagtgtcgatgttggaaggcacttatctggtttgggtggactgttcagtgctgaatcagtcatcggatgagatagtgaaaaccttgttggagaaagaaaaactttgggtaaacgagggcagcttgtacggagaggctggtgaaggatttatccgtattaatatcgcctgtccgcgacagcagttgatagaaggattaaacagattgaggcgggctttgaaataataaaataattgtcaatttattgagagtacctccttctcactccctgtaaatacgaataaaaagaagtaatatggaaagtcagaatcgctcgaataggtaagacgggaaatctgtaataatggtactaacttctgtaatttgtatcagtcttgtaaggctataacttcgtatttttgtgttattaattttaaaacaattagactatgaacatgaagaaattaattgttactttagtagttgcattaataacgtttttcggatataattcattaaatgcacagaatatgaaaaaagaagaagtacctcaaaacatcagcgcatttccgataggagaggagaatgtaggattcaaacaatattttacgggggaatcctggctggcgcgactgactagtaacaaagacttgaatgtccccatgtccaacgttacttttgaacccggttgccgcaataactggcacagccatacgggtggacaaatcctgattgctgtcggtggtgtaggatattatcaggaacgtggtaaggcgtcacgccgcttgcttcccggtgatgtggttgaaatcgctccgaacatagaacattggcacggtgccgcccccgatagctggttctcgcatctggctatcgaatgtaatccgcaaaccaacaagaatatgtggctggaacgtgtgagcgaccaacaatatgccgaagctacaaaagacaacgtggcaaccggactaaaagctaccgaccccgaattggacggaatatttagtaattttacaaaagaagtgcaggaatatggtgacttggatactaaaacccgccttatggtaaccttggcatccaatatagcttcgcaggcacaggctgaataccgtatcacacttgaaaacgctcttaatgaaggcattaccccgatagaagtgaaggaaatcctttatcaggcagtagcttatgcaggcatggctaaggtgagagattttatcggtcttactaatggtatattgctcgcccgtggcgtacgccttcctttagagggacaatcggttgtgtcatccgaaacccgtttcgacaaagggctggagttgcagaaatccattttcggtgaacggatagaacagatgcataaaagcgctcccgagaatcagaagcatatccagcgttatctctccgccaattgcttcggagactatcagacacgtagcggactgaatgtgaagacacgtgaattggttacgttctctattcttgtttccttaggcggttgtgagtcacaagtaaaaggacacatacagggaaatgtcaacgtagggaataataaagatacgttgctggctgtcgtcacacaactattgccctacatcggctatccgcgtacactcaatgccatagcctgtctgaatgaagtgattccggaaaagtaaaaaaagagcattcctgatgacaggcgattaaaacttatccgggacttgacaaacgcttttttatttcgtatatttgtagtcaggaaaagaatgaaatcaatgaattatggatgaaagaataactgaaatatgagtatagaatggatagaaaatagtataatattacaacgaacttagctcattcccttagcttatactaaaggatagaacggcagatataccccaaaggttgcaaactttacagagtttgcagcctttttttgttgcatattattgatgctaaattcgcaaatccggattttaaagtttataataaacggaggggacgtttataataaacggtcgcagtatttattaataactcaatcaacgttcaagtagtaagttgttgccttttttgtattacctttttcttaagggtgggaactttatcatttgtggtgataataattgacattatagtcagacgattaaatcttacaaatagactttgaatgcatatttcccactttttggcaggagtccccaaatattaaatagttgttaattggagtctcattctgtgaactaatcttttatatgatatgttgtttactgtgaataacgaatttgattataaactaaagaattagacatggaacacataaaacatttctaatgatttagcaagcaaaacatcacagtttaaaaacatttgattatgaaaaaatctattattttattagcttttgtattgggtgcatttacagcaaacgcccaatcagtagtagaaggtacaaagttcacagacaactggtctgttgaagtaaatgcgggagcaatcactcctcttactcatagcgctttctttaagagtatgcgtcccggttttggagtagggttctcaaaacaattgactcctatctttggtttgggattccagggaatgggatatatcaacaccactccgagtaaaacggccttcgatgcttcggatgtcagtttattgggtaaagtcaatttgatgaacctgtttgcaagttatcaaggcgagcctcgtttgtttgaagtagaagcagtagccggaatgggctggttgcattattatgtaaatggtgacggagatcagaactcatggtctacccgtttcggattgaacttcaatttcaatcttggtgaaacgaaagcatggacattgggaatcaaacctgctatcgtatatgatatgcaaggtagctttcccgaaacaaagagccgtttcaatgcgaataatgcagcgtttgaactgactgcaggattgacttatcacttcaagacaagtaccggaaaccattatttcaccaaagtaaaagtctacaaccaggcggaaatcgacgggctgaactcttcaatcaatgctcttcgttctgaagtgaacaataaggacggtgagttgaacactgccaaccggcaaatcaacggcttgcagaaagacttggaagaatgtcgtacaaaggtagttcctgttgaaacagtagtcaaaaccgctcgcgttccggaatctatcattactttcagacaaggtcgttcatcagtagacgcgtcacagttgccgaatgtggaacgtgtagcttcctacatgaagaaatatcctgattcaaaagtgattatcaaaggatacgcttctccggaaggaagtgtggaagtcaatgctagaatagctgccgcacgtgcggaagctgtcaagactatcctggtcaataaatacaagattaacgcttcccgtatcactgccgaaggtcagggcgtaggtgacatgtttaccgaaccggattggaaccgcgtaagtatatgtactattgaagattaatacagaagtatagaaactgaatagtaagggctgctccggaaaacgggggcagcccttcttgtttgtattttctagttttgaaagtttagtgtacgattgctttgtacgtggcgaaaaataattatttttgcagacgtcgttcatgcgttcttgcgctttgaatgggcaaatatcaaccattaaaaaaagtattatgaaaagagtattcgtatttcaagactttaagtcacagaaattctggagtatagatgtagttggaacagacgtaaccgttaactatggcaaattgggaacagacggtcagacacaagtcaaaaactactcgactgctgaagaagccgaaaaagctgccaataaacttattgcggagaaaacaaagaaaggctatgtggaaacagcagaggaaacggcacgcgagatgaaagtggaagccaagaaatacactttgagttatgatgaatacgaaaacgatgtccggctattggataagattctgaaagacaagcatctgcccgaatataaacaaatcactatcggttgttgggactatgaaggtgaagattgctccgatttactgaaaggaatactcgaaaataaagataaatttgcacacattgaaggcttgttttggggagatatcgatcaggaagaacaggagatctcctggattgaacaggcagacctcagcccgttgctcgacgctatgcccaaattgaaagacttgaaaataaaaggtacgaattgcctgcgcctgggacaaacctcacgtccggaattgcgttcactggagattatcagtggcggtcttcctacggaagtcgtagaggatattctggcgtccgattttccgaatctggaaaaactggttctgtatgtcggcgtggaagactacggctttgaagctgatattgaaatattccgtccgcttttctctaagacgcgtttcccgaaattgacttatcttggcatcgtgaactcggaagaacaggatgagattgtaaaaatgttcctggagtcggatatccttcctcaattggagacaatggatatttcggcaggtgtcctcaaagatgaaggtgcccaactcttgctggacaatatggacaagattgcccatttgaagtttattaatatgcgctacaattatttgagcaagggcatgaagaagaagttgcaggaacttccgatgaagattgatattgcagaatcggaagaagctgatgaggacgacggtgaaatgtggtattacccgatgattacggagtaggggaaatgcagataatcgttgtcagcaactctccgtccaaacgcatcgaatactttgtcgaagccggcaggagcttgcagacgggagtccgctttatgacttacgaagaattgttcaattgcctgccatcattgcggcaggcagttgtcaaactggaaccgtgggtaagctgcgaaacggattttctgaaatataccctgtttaatgacgaatacaaaacgatattacagcggttggacgagacggcactgcctgacgatgtgcatttcttgaatccgcctcatgcattattgcaggctcttgataaaaaggaagccaaacggattttatcagccaatgatctgaatgtaactccgatgttggatactccacattctttcgatgaactggcgcaagctctttccggttgtagcagggggtgttttctgaaaccacgttatggttcgggagcaggtggcattatggcaatccgctatcagccgcgtcagaagaaatgggtggtttatactaccttgcagaaagtggacagagtcattcataatacaaaacgtattcatcgtctgactaaggagcaagatattcttccattggcggaagcggtcatgcatactggggctattttggaagaatggatacctaaggagcagttgcagggagagaattatgaccttcgggtagtatctggagaggaagagattgactatgtggtagtcagatgtagcaaggggggtataaccaatctgcacctgaacaacaacgcacgcctgtggagcgaacttcccttgtcagaagatgtccgtcaacggatttacctcttatgcaggaaagccgtccgcacactgggtttgcgatatggcggagtagatgtactgatagaaagaggaacggatactccttatattattgaggtcaacggacaaggcgaccacatttaccaggatatgtacgctcacaattctatttatacccgacagataagaacaataaaaaagaaatatgaccatgcagatagatgaactgcccgctggagaacaaaaccagtgtcctgatatggatatgaaccgggtggtagggacacatgatatacttatgctttgcttcgatacgttgcgctacgatgtgagtaaagcggaagaagccgccggcgggacaccggttttgaacagtcacggcggtttgtgggagaaaaggcacgcgccgggaaattttacttacccctctcattttgccatttttgcaggctttctcccttcaccggcagagcctcattccttgcgtagccgtaaatggctgtttttccccgtgcaggcagggacggggcgtatcccgcccaaaggcagttatccctttacggaagctactttcgtgcagagccttgccaataagggatatgagacaatctgcataggcggcgtgaatttcttcagcaaacgcaatgaactgggacgtgtgtttcccagttattttacgaaaagctactggttgccgacctttggctgtacggctcctgacagtacggagaagcagattgattttgccttgaagaaactggagaattactctgcggacaaacgtatattcatgtatatcaacttttccgctatccattacccgaactgtcactatgtgaaaggtaaaacgaaagacgataaggaatcacacgcggcggcattgagatatatcgacagtcagttgccccgtttgtttgaagtttttcagaagcgtgccgacacactggtgattgccctttccgaccacggcacctgctatggtgaagacggctacgaatatcactgcatatcccacgaaacagtctacacggttccttacaaacactttatcctgacgaaacaatgaatcaacctctatcccgatatgtagactatatgtatagttatccgcataaaacggcgtaccgtccttttcctgctccggtttcgttgctcccatatttggagcaactgcaaggcagaaaggcgtcactctactttcatatccctttttgtagccataaatgcggatactgcaacttattctctttgcaaacgaaccgtacagaatatatcgccacttatctggacacccttcacagacaggcgcaacaactctcaccgctcactgccggactgacgtttgatagctttgccatcggtggcggtactccgttgctactgactgttccgcaactggaacaactaatggctaccgccgctttgttcggcgtgcatccgtcccatgcctttacttccgtagagacttcaccggaatatgcagatcgtccgcgtctcaatgtcttgaaaaaggcgggagtatctcgcgtaagtatcggcatacagagttttcaagatgaagaactgaaagctatcaaaaggcgtccccggcaaaacactatttatcaagcattagacgatatccgccaaatggattttccctatttcaatatcgacttgatttatggtattaagggacagacggtagaaagtttcctctattcactagaagaagcgctccggttccagccgaacgaactgtttatttatccgctatatgtacgtcagggtacaggtattaccgaacgggaaccagatgatgtctgttttcgaatgtatcgtgccgcttgcaagttattgcaagcaaaaggctttctgcaaacatccatgcggcgtttcattcatcatccgtccactgacgcggaagtctcatgtggcgatgaagtaatgctttcgtgtgggtcgggtggacgcagctatttgggtgatttacactatgccacccggtatacagtctgtcagcaatgcattgcccgcgagatagacgaatatatggcaaccactgatttcaccgtagcccgtaacggatttatcctttctgcaaaggaacaacaacaacgttttatcatcaagaatctgatgtactatatggggattgacaaggctgaatatactcggcgttttggagagccgcttgataggactccgttgttccgccaattggcggaacagtactggatagaggaaactcctgaacgtatccggctgactcccgaaggacttagttattccgattatatcggtcagctatttatcactccgggaatcaggcaattaatggagacttattcctattgaatgaaaattgagtgaagtttaaatgatatttgaatgaaatgacaaacgagggttctttactttccgtccgacgtatatactatcggagcaaattgaatggttgtaattacacttgttcttattgtcctttcggcaagaagtctcatcctgcatctaaaatgcgggacaagcaggcatggagtcgttttattaccgctattgagcaatgggaaggagagactttgcaactatttgtcattccctatggtgaagcactcatacatcgctattatagggaaggaatcatacagcttgcgtcattgccgcaagttaccggaatttcctgtcagactaatctttcttttcctgccgatgaatggctgaacgaactccggactgctccggcattgataaataagataaaagtttgggctagctttcatccggaaatgacttcagtagagaaatttgtccggcaacttcatacgctccataatgcaggaatacaggtttgtgccggagctgtcggtaacccgttggcaaaaaatatacttgctgatttgcgaaatactctttcaccggatatttatctgtttattaatgccatgcaggggttaaagtctccattgagcaacgaagatattcgtttttttactcaactggataatcttttcgagtatgatttgcgaaacgctccggctcaatgggagaattgctcaggcggaagaagtgcttgcttcattgactggaaaggggatatctttgcctgtcctagaagtaaggtgaagataggcaatctttatcggagtcaaaagctagacacttcgctttcttgtcagcggaaagtttgtgattgttacattgctttcagtaatctgactaatcatcctttgcattctataatgggcaaaggtacattttggcggataccggataagcccttgattactgccgtttttttcgatgtggacggaacattgaccgatgcacaaggaaaagttccggaaaactatgccaatgtcttacactatatggcgcaatctgtcccattatatctggctacttctttatcagtggaacaggcgcggagaaaattaggtaagactcttttcagtttgttcaaaggtggggcatttgcagacggtggattattgttgtatgacgggcggaaccgatgtttatcggttgaattactaccggatgtaaacggggaatccgcaaagataacggcgcatagctatgaaggccaagtctataagtatagcatgctggtttatgagaaagaacagagggagaacattctttcccgattgaaagcaaaaccttatcaggtattttataagccaccccttatcacagttgtacataaggaagccggcaaaaagaaaggagtacttcatatatgtaaagttttagctttccctctggagcaagtattgattgtcggcaactcgcagaaggattgggaaatgatgtcggcagtaccccattcttgtgcagtgatgaactccgaaccgtttttgacagaacatgcccgctacacgttgaatcccgaccgcctgcctgctttcttccgtttccgcgaatagaaaagcagataaagttattgtatatcaatttaaagtgattattttcgcagcctacgttatctaaaaacgcatcaagttatgaaagtacaaaacaacatatgtgagggaagtctcatcaccaattaccttccggcggattactgtgattctttttcaaaaacaatagtgagtgataaagtggttactcccgaagtattgacgattctacttcttctttattcgtcctttccataaaacgatcatgcgttccattctgaacagagttgccaaacaaatgaaataaagaatctatggatatggacatctatgacatcattgataatatttacaaactgccgcttgcatccaaggaagccctattgaatgaaacaccggaagtaacctatcctaaaggtttccacctgtttctggcaaaccgtaaaagttccaaattctatctgatgaagaaaggaatgttgcatgcatatacctataaatcggacaagaaagtgacattctggttcggaaaggagggcgacgctattttccctttgcagaccctttacaataatcaggcgggatatgagaatatagaattattggaagacagtgtgctgtatgaattgagtgtcgacaaactgcacgacctttatctggtggatatacatatagccaactgggggcggaagtttgccgaaagggagtgtatcaaatcagaacagctatttatatcacggcagttcaagacctcattggaacgctatcaggatttgattgctgattaccccgatatacttcaacgtgtaccattaggtattatcgcttcctatctgggaatctcccaagttagtctgagcagaataagggcgaagataagatgattttttatcaaatgtaaaatcccttttttacaaatgtaaaatagaggctgccggaaattcatgacctttgcaaataaaaaaatgttatgaattggattcttttgattttggcaggttgccttgagctggtgtttactttctgcctgggaaagataaacagggtattcggaatggaaaaatatgtgtggtcattcgtactcttggtatccttatgtgtgagtatgctgcttctgataaaggtgaccaagacattgccggttggtacggcttatgcgatatggacaggcatcggtgcggcgggcacggtattaatcggtattttcttctttaaagaacctgcaagtgtgggacggttgttctttatcttcacactgatttgctccattatcgggttgaaattggtatcacattgatatccgattgtatcctgaaaaaataaagtgcagctataatttggtagttatgaaaacaaagcccatatttgcagcccgaaaacaggggcaggcataaaaatcctcatcggagggtgctataatagataattatagtgccggataagatgaatggtgcaaatcattcgcttgtccggcactatttttttattgtaacaatttaagataagaggtaaagtatcgaagaaactatgaaagagttgaatttgacacaggggagcgttccgaaagtattgctgcaatttgcagtacctttccttattgccaacgtgcttcaggcactttatggtggggcggacttgtttgttgtagggcaatacgatgattctgccagtgtggcggctgtagctatcggcagccaggtgatgcagacgattacaggtatcatccttggcattacaacggggacaaccgtgctgattgctattgccaccggagcaaaggataataggaaagtggcatctacaatcggttcttccgtatggctgttttcaatcgtaggtgttttgctgactttagtcatggtcgtgtttcacgggcagatagccgaactgatgcatacgcctgcggaagcaatggctgatacgaaaagttatattctggtatgctcgacaggtattttattcattattgggtacaacgtagtgtgtggtatcctgcgtggactgggcgactccaaaacaccgctttattttgtaggattggcgtgcgtgattaatattgtccttgactttattttggtcggctatttccatttgggggctacgggagccgcattggctacaataacagcacaggggggcagttttgttatttcgctttggttcttgcacgggcatggattccatttcgagtttactcggaaagatatccggcttaacaagaacttatccaaaaagattatggtgctgggagcacccattgcattgcaggacgcgttaatcaatatttcattcttgattataacggtcattgtcaaccaaatgggagtcatcgcatcggcgtctttgggtgttgtggagaaaatcatcgtctttgcgatgctgccgccaatggcgatatcgtcggcagtggcaaccatgacggcacagaattacggtgcgggactgatacagcggatgaacaaatgcctggcttcgggcattgggattgcccttgttttcggtgtatcggtttgtgtgtattcccaattcctgccggagacgcttaccgcattcttttccaaagatgtggcggtggtggcaatggcggcggagtatctgcgggggtatagtatcgactgtatcattgtaagttttgtgttttgcatcaattcttacttcagcggacaggggaattcattgttcccgatgattcacagtctgatagcgaccttcctgttccgtattccgttgtcgtactggttcagtcagatagacagttcctcgctgttcctcatgggctttgctccgcccttgtcgacggtggcttcgttgttgatttgtatttggtatttgcgatataaccaaaagagaatgtactcgaaaggcactgcgatgcctgctatatcgaattaagtgttttctaagtgacatatattaactaaaatcaatttgtatggaagcttatttgaagaaactctgttttgagtatttggcgggaagtcagaaataagaaagcgtttagttatctatacttttaaagatattccttatcagatagtctattattgtttccatttctctctaaagtggaaaagccttggattatttgataaggaatattatttttgtacttcataatgaagaactcgataccccgatatacttttcacaagaataagtatggcagtgaacttttgattgatgtcgtcgaactgaaatatgtgaagaagttcctggctgaaagttccgtccatacattgacttattatgacattacttttataacggaaggagaggggagcttttccattgacaaccgtacttatgaagctttccctcaagatgtgtttttttctaaggcgggagagattcggaactgggatacgcgtcatataacaaatggatatgccttgatttttgaggatgagtttttatcttccctccttagagattccatgtttgtccggcatcttgcgtttttcaaaccggaaaagacatcagccaaactgcatcttccggacgaactttatacacgtgtccttcaagtattacacaatatcaaaacggagattgactcttacaaacagaatgataatgacgtgcatgttttgagggcattgctgtatgaagttctaatgctgttggagcgggcgtatcagaaggcggtttcaaacgaagaaatccccacagataaagaaaccaataatactcatatagacagattcatccatttggtcggaacccatttgaaggaacaacattccgttcagttttatgcggataaactttgcatcactcccaattacctgaatgaaatcataacgtcggtaatgggggttagtgcgaaacaatacattcagaataaagtgatagatgaggctaagagattacttgcttatacagacgctccgatatcggatattgcgtttgagcttcatttttcaacggtttcttattttatccgccgcttccggcagcatacgggagaaactcccttgctttaccgtaaaaagtataaaccgtaaaaagtactatttctccctttctttttattgcatcggctctgctcaatatccttacttttgcatcaaataataaccaattaattattaaatgatgagagatgcagaaaaaacggtgggaaccatgattgacaagcagaaaacagcctttatcggttccatagacagcgaaggatttcccaatatcaaagccatgttgcaaccccggaaaagggaagggataaaaacgatttatctgacaacgaatacttcgtcaatgcgtgttgcacaataccggaagaacagtcatgcctgtatttacttttgtgataaccgcttctttcggggagtaatgttgcgcggtaccatggaagtgttggttgatagtgtcagtaaagagatgatatggcaggaaggcgatataatgtattatcccgaaggtgttaccgactccgactattgtgtattgaaatttacggcaacttccggtaggttttatagtaatttcaaatcggagagctttatcgtagaatagaactcatagtacataagagaaattgagtgacagagcttttatagtctcaatgtactatttttaagattgtataaaagaatagcgatttaaaaaaaacaatgaattggcgactaaattgtatcgctcaatgcaataatatatataaatacagacctatttctcttagacgtagtacaattgtaaccattctgattgtttaaatattctttttttaagaatggtcattctttcattcgttttatgtctccgggcagaatccatttttgtaaaacagataactttcttctatcgcatcggttgtatccgcttctaatgcatataatatttccttgcaaaattccagctgcccggttccgttggcagttacaatatttccgtctcttacagcctgtttgttgatatagttggaatcgcctgtatatttgtctccggcatactgttttaaataatcgagtgtattgctggtatgcttaacctcattaagaaaaccatgcataccaagaaatacagaagcattgcatattccggcaactaacttattctcttttactgctttttctacaagtggaactattagttcacctagaggtgagaaccaattcattcctccaattaataccaaaccggcataattttccggcatatcgttgagcccgtaatcgggcagcaccttgaatccacctattgaacttacaggttctttggttattgataaagttttcactttataactaataggatttccgggcttgactccctgattcaaacaggtagctatatatgcaccttcccagtcggcgaaaccttctagaattacaaatattacttctttcatataaacttctatctttttgcgtgtacgaagatactatatttaattgattgtagaacgtttttatttaattgttattatctcatgtgatgtataacctttctgttatattttccattatccctttattagtacggcatcataaacttatgtatgaaaagaaaatatcttttgatgtgctcggtgtgtgcaggagggagtgataaaaaaagctctgtaattcaatgtttacagagctttttccttttcttaagaagcggtgcgtacgggactcgaacccgtgaccccatgcgtgacaggcatgtattctaaccaactgaactaacgcaccaaattttatttagactaactcattttatttctttccgcctctctagtaaagaagcggtgcgtacgggactcgaacccgtgaccccatgcgtgacaggcatgtattctaaccaactgaactaacgcaccagaatttcattttgttaatctgcatctctctcgattgcgggtgcaaaggtagttgttttttgtaaatctgcaagcgttttgagaaaagtttttttcaagaaaaaacgagaagaacgtttagtgcctcattttgagtacttttgtaatgaaaaaaaatattgttttttcttctctcaggataatgacgctatccggttgtcatagtgacgccattataatgagatagtgacgttatccgaagacaatagcgtcactatcctgaagtttgtcatcctcttcatagaaaatagttcccgatttctttctatctgtaagaaaccaccgtttttatatcaactttctgcttgaataattcgtaattttgcaataaatcgttatttttgcggactaaaataagaaaggtggaaaatattctgccgggaatcgtaaattagtaaaaagaatgatgacaacagccaaactgttattgcactgtcccgacaaaccgggaatccttgcggaagtgacagactttattacggtaaacaaaggaaatattatctatttggatcaatatgtagaccatgtagaaaacatcttcttcatgcgtattgaatgggaattgaaagactttctggttccccaggaaaagattgaagattatttcagaacactttacggccaaaagtacgaaatggatttccgcctttatttttcggatgtaaaaccgcgtatggcaattttcgtttctaagctgtcgcattgtctttttgatatgctggctcgctatacagccggagagtggaatgtggagatacctcttataataagcaaccaccccgatttgcaacatgtagccgaacgtttcggtattcctttctatctgttccctattactaaagagacaaaagaagaacaggagcgtaaggaaatggaactgcttgccaaacataaaattacatttatcgtactggcacgctatatgcaagtgatttccgaacagatgattaatgcttatccgaataagataatcaatattcatcattctttccttcctgcgttcgtcggtgcgaaaccatatcacgccgctttccagagaggtgtgaagattattggtgcaacaagccattacgtaacgacagagttggatgcaggtccgattatcgaacaggatgtagtgcgtatcactcataaagattctattgaagatcttgtaaacaaaggaaaggacttggagaaaatcgttctctcgcgtgcggtacagaagcacattgaacgtaaagttttggcctataaaaataaaacagtaatatttagctgatgaaagtagcagtcgtaaaatacaatgccggcaatatccgttctgtggattatgtattgaaacggttgggggtggaagcagtgattactgccgataaagaagaactccagtcggccgataaagtaattttccccggagtaggagaggcggaaactaccatgaaccacttgaaagcgacaggattggacgaactgataaagaacctgcgtcagcctgtgctcggaatttgtctcggtatgcagttgatgtgccgttattctgaagaaggaggagtggattgcctgaatatttttgatgtggatgtgaaacgttttgttccgcaaaggcacgaagataaggtgccgcacatggggtggaatacaatcggcaaaacgaatagcaaactctttgaaggatttaccgaagaagaatttgtctacttcgtgcatagcttttatgtgccgacttgcaactttactgccgctacgactgattatattcatccgtttagtgctgccttgcataaagataacttttatgccacccagtttcatccggagaaaagcggtaagacgggagagaagattctgacgaactttctgaatctataataaactatgtcaccgtttataataaactccaccatatttataataaactcgttcatcgtttataataaactttttgaggggataaaaagcggtgttgaacagattggaaagaggtagtaataagagaactgtaaattgtcaaatagcaaataaataatagatgatagaaattattccagccattgatattattgacggaaagtgtgtacgcctttcccagggagattacgacagtaagaaagtatataacgaaaatccggtggaagttgccaaggaatttgaagcgaacggtgttcgcagactccatgtggtggacttggacggagctgcttctcaccatgtaatcaatcatcgagtattggaacaaatcgctacccgtacttccttaataatagattttggcggcggagtaaagagtgatgaagatttgaaaatagctttcgaaagcggtgcgcaaatggtgacgggcggcagtattgccgtgaaagaccccgaactgttctgtcattggctggaagtgtatggaagtgagaaaatcatattgggagcggacgtaaaggaacataagatagccgtaaacggttggaaagacgaaagcgcctgtgaacttttcccgttcctcgaagactatataaataaaggtgtccggaaagtgatctgcacggacatcagttgcgacgggatgctgaaaggaccctctattgacttgtacaaagaaatgctggaaaaattccccgatctctatctaatggccagcggcggggtaagtaatgtcgatgacattattgctttgaacgaagccggagtgcccggagtaatctttggaaaagctctttatgaaggacatctcaccctgcaagacttgagaatctttttggattgagacttttgaaagtctgattttgaattgtcaaacagtaaataaaaataggattgtgttagcaaaaagaatagtaccttgtctggacatcaaagacggacaaaccgtgaaaggaacgaattttgtaaatttgcgccaggccggtgatccggtggaattgggacgtgcttatagtgaacagggagctgatgaacttgttttcctggatattactgccagccatgaggggcgtaagacttttacggaattggtaaaacggattgctgccaatatcaatattccgtttaccgtaggcggtggaatcaatgaattgagtgatgtggaccgtctgttgaatgccggcgccgataagatttctatcaattcgtctgctatccgcaacccgcagttgattgacgagattgccaagaatttcggttcgcaagtttgtgtgttggcagtagacgccaagcaaacggaaaaaggctggaaatgctacctgaatggtggacgtattgaaactgacaaggatctgtttgactggacaaaagaagcacaggaacgtggggccggagaaatcctttttacgagcatgaatcatgacggagtaaagaccggatatgcgaacgaggcacttgccgctttggctggacaactttcggttcctgtgattgcttcgggaggtgcaggctgcaaagagcacttccgtgacgtttttttgcaaggaaaagcagatgcggcactggctgccagtgtttttcacttcggagaaataaaaattcccgaattaaaatcgtatctttgcggcgaaggaattaccattaggtaattgttgcgttgcaaaaacaggtttttaggctgcggcgaaggatttgtcattggataattgcacataattagcgaataagtaaattaagaacttaaaataaaatggaattggatttcgataagatgaacggactcgttccggctatcatacaggacaacgaaacacgtaaagtcctgatgctgggcttcatgaataaagaggcttatgataaaacggtagaaaccggaaaagtaacttttttcagccgaacaaagaaccgtctttggacgaaaggcgaagagagcggcaatttccttcacgtcgtttctatcaaggccgattgtgacaatgatacgttattgatacaggtaaatccggtaggtccggtttgccacacaggtacggatacttgttggggtgaaaagaatgaagaaccggtcatgtttctgaaagcattgcaggattttattgacaaacgtcatgaagaaatgccggaaggttcttatacgaccagtctgttcgaatccggaatcaataagatagcacagaaagtgggcgaagaagcagtagaaactgtcattgaagcaacaaacggcaccaatgagcgtttgatttacgaaggagccgatttgatttatcacatgattgtattattaacttcaaaaggttaccgcatcgaagaccttgcacgcgaattgcaggaaagacatagcagtacatggaagaagcattaattcaatataagaacgtagaaatacatcagcaggaactctgtgtgctaagtggtgtaaatctggaactgcacaaaggagagttcgtctatctgataggaaaagtaggctccggaaaaacaagtctgctcaagaccttgtatggcgaactggacgtaattgacggtgatgcggaagtgctgggctataatatgcgctctatcaaacgtaagcatatcccgcagctacgccggaagttaggcattgtgtttcaggattttcaactgttgacagaccgtactgtgtacaataatctggagtttgtacttcgtgccaccggctggaagaataaacaagagataaaagaacgtattgaggaagtacttgatttagtggggatgtccaataaaggctataaaatccctaacgagctttccggcggcgaacagcagcgtatcgtaatcgcacgtgccgtacttaattctccggctatcattctggcggatgaaccgaccggaaacttggatgtagagacaggtaagtccattgtagaattgttgcacaacatttgtgaaaccggttcgtccgtagtgatgacgacgcacaatctgcaattactgaaagaatatcccggcagggtataccgttgtgccgaacatcatatcaccgatgtgaccgacgaatatatgccccgacagagaacaatagaaatagatttaaatatagataactaaaacagtaacgaaaatgaaagttttaaagtttggaggaacttccgtaggttctgctcagcgcatgaaggaagtagccaaattgattaccgatggtgaacagaagattgttgtcctttcagctatgtcaggtacgacaaacacattggtggaaatttcggactatctgtataagaagaatccggagggtgccaacgagattatcaataagctggaggctaaatataaacagcacgttgatgaactgtacgcaactcaggagtataaacagaaaggtctggaagtcatcaagtctcacttcgactacatccgctcctacactaaagaccttttcactttgttcgaagagaaagtggttttggcacagggagagcttatctctacggctatggtgaacttctatctgcaggaatgtggtgtgaagtcagtattgcttccggctttggaattcatgcgtactgacaagaacgcagaaccggaccctgtatatattaaggagaaactgcaggcacagctcgaactttatccggatatggatatttatatcacgcaaggtttcatctgccgcaacgcttatggcgagatcgataacctgcaacgtggtggcagcgattacacagcttccctgattggtgcagccgtgaatgcttccgaaatccagatatggacagatattgacggaatgcacaacaacgacccgcgcattgtcgacaagactgccccggttcgccagttgcattttgaagaagcagccgagttggcttacttcggtgcaaaaattctgcacccgacctgcattcagcctgctaaatatgccaatatccctgtacgtctgttgaatacaatggatccgcatgctccggggacattaatttctaatgacacagagaaagggaaaatcaaagctgtagctgcaaaagataacattacggccattaaaatcaagtcaagccgtatgttgcttgctcatggtttcctgcgcaaagtattcgaaatctttgaaagttaccagacttcgatcgatatgatttgtacttcggaagtcggtgtgtctgtcacgatagataacacgaaacacctgaacgagattctggatgacttgaagaaatacggtacagtgaccgtcgacaaagaaatgtgtatcatctgcgtcgtgggcgacttggagtgggagaacgtcggtttcgaagcaaaagcgcttgacgccatgcgtgacataccggtacgaatgatttcattcggaggaagtaactacaacatttctttcctcattcgggaatgtgacaagaagacagcattacagtcgctgagcgatatgcttttcaacaacaaataattccacaaattatattgagcgcttttaccaaactgataaaagcgctcttttttaactaactaaacaagttttttgagttatgaaaggaatatttccaatcgataagttccgtactttgcagacacctttctattattacgatacgaaagtgctgcgtgatacattgtcggctatcaaccaggaggttgccaaatatcctaactattccgtacactatgcagtaaaagcaaacgccaatccgaaagtgcttaccattatccgtgaaagcggtatgggagcagattgtgtgagtggtggagaaatccgtgctgctatccgtgccggatttcctgcaagcaaaattgtctttgcgggagtaggcaaagccgattgggagattaacctcggactggaatacggaatcttctgtttcaatgtagaatctattcctgaactggaagtgataaacgaacttgctgctgctcaaaataagatagccaatgtggctttccgtatcaatcccgatgtcggtgcgcatactcatgccaatattacgaccggcctggccgagaacaaatttggaatcagtatgcaggatatggataaagtgatagatgtggcagtagaaatgaagcatgtcaaattcatcggacttcactttcacatcggttctcagattctggatatgggtgactttattgccctttgcaaccgtgtcaacgaattgcaggataagctggaagcccgtcgcattctggtggaacacatcaatgtaggcggtggcttgggcattgattacggacatcccaaccgtcagccaattcccaactttaaggattatttctcaacctatgccggacaactgaaactgcgtccttatcagactctgcattttgagttggggcgtgcagtcgttggccaatgcggttcattgatctccaaagtgttatatgtgaaacagggagcgaaaaagaaattcgctatccttgatgcaggcatgacggacttgatccgccccgccttatatcaggcataccacaaaatggaaaacatcacttctgaagaaccggtagaatcttatgatgtagtagggcctatctgcgaatcgtcggatgttttcggaaaagcgatcgatctgaacaaggtgaagcgaggcgacttgatagctcttcgctcagcaggtgcctacggtgagattatggcttccggttacaactgtcgtgagttgccgaaaggatatacttctgacgagttggtgtaaataaaatgtgaatgtagtttaaaaatacaggggagtcggaacaattttaactgaaatcttgttatttttgtaatgagttcaataagaaactacattaacaacttaataaaaagatacgattatgatttcagaaaaattacaaaaggcaatcaatgaacagatcacagcagaaatgtggtcgtctaacctgtatttggcaatgtctttcttctttgagaaggaaggtttcagcggttttgcacattggatgaagaaacagtctcaggaagaaatgggacatgcttatgcaatggctgattatattatcaagcgtggtggaactgcaatggtcgacaagattgatgtcgttcctaacggctggggtactccgttggaagtgtttgaacacgtttacaaacacgaatgccatgtatctgcattggtagacaaactggttgacgtggctgccgctgagaaggacaaagcaactcaggacttcttgtggggattcgttcgcgaacaggtagaagaagaagctactgcacagggaatcgttgataagatcaagaaagccggtgacaccggtatcttctttgttgactcacagttgggacaacgttgataatagtctgaaaatatatttataatatataggaagctgtttggatttatttccggacagcttctttttcatttcatgtgtaatagtgtgcggatttgcagatgaataatctattttttgtgtcctttttccattgccccgagatagatctccagcgaacgggtagaaatctgaatctcgcggaaagatacgcccagagatgcgatcagcagaatcaaagccagtccgaagacataagcggataataattgcagtccgatataaatcagaaacatactcactacgcagaaaaacaggcttgcaatgcccagcccttgcatggtacgtgtcaggttcagtcgtttccgcaagttttcaatctgtgccacggtgatgtccgaagggttttccatatagcggtctcgcagctggcgtacaagttgtgcatacgataagaaacgattggtgtaagccaataatatcagtgaaactgcggagaaaagcagagcaggggtggtgagagtaagttcttccatatataaattaaaaatcttccattgttattgtcgataatcaaatccttatgattacaataataacaatggaagaaaagaaaatgtttttttatttcagtacaccgagttctttacctactttgataaaggcagcgatgcacttgtcgagatgttccttctcgtgtccggcagagatttgtacacggatacgtgcctggtctttcggaactaccggataatagaatccggttacgtagataccttcctcctgcatacgtgcggcataaatctgtgacaacttcgcgtcatacagcatgacagcgcaaatagcactttgtgtcggtttgatatcgaatccggcagcagtcatcttgtcgcggaagtaatttacattctccacgagtttgtcatgcagcgcattgctttctttcagtatcttgaatacttccaggcttgcaccgataatgcccggagccaatgagttggagaacagatacgggcggctgcgttggcgcagtaagtcaataatctccttacgtccggtagtaaatcctcctaaagcacctccgaaagctttacccagcgtaccggtgtaaatatccacacgaccatgagttttgtagagttcgcttacgccgtgtccggtagcgcctaccacgccggcagagtgtgattcgtctaccataaccagcgcatcatatttctcggcaaggtcacaaatctgatccatgggagctacgttgccgtccatagagaacacgccgtctgtgacgataatgcggaaacgttgagcttgtgcctcttgcaggcatttctccagctcgttcatgtcagcattggcgtaacgatagcgtttagctttgcaaagacgtacaccgtcgataatagaagcatggttcagagaatccgagataatggcatcctgatccgagaaaagcggttcgaacacaccaccgtttgcatcgaagcaggcagcatatagaatcgtgtcttctgtttggaaatagtcggaaatagcgtcttccagttctttgtgtatatcttgtgttccacaaatgaaacgaacggaggacataccatatccgcgtcggttcatcatttcctgggaagctttgatcaatcgggggtgattggacagtcccaggtagttgttagcgcagaagttcagcacttctttaccttttacagtgatggcagcttgctgcgcactttcaattagtcgttcttctttataaagaccggcttctttaatttcagccaatgtttggctgagaaaatctttcattttaccgtacatagtgtttgagtaattaagttcgattacaaaggacacaatttttattggaataaccatatctttttgattaaaatctgaaaaaaaagtgcttactttgcgcactatttagcttaataatttaagtacgaagaaaaaatgaaacacattttgattattggagccaccggacagatcggctccgagttaacgatggagctacgtaaacgctatggtaacacaaacgtggtagctggttatatcccgggtgcagaacctaagggagagttgaaagaatcaggaccggcggctattgtcgacgtgactaatggggaaatgattgcgtctgtggtgaaagaataccacattgacacagtgtataatctggctgccttgctatcagtggtagccgaatcgaagccgaagctggcttggaagattggcattgatgggctatggaatgtattggaagtagcgcgcgaacagggatgtgccgtgtttacccccagttcaatcggttcttttggtgcaagtacacctcatacgaagacgccgcaggacaccattcagcgtccgcgtaccatgtatggagttactaaagtgacaactgagttgttgagcgactactattttaataaatatggtgtcgacactcgtgcagtccgtttcccgggcattatctcgaacgtaacccctccgggtggaggaacaaccgattacgctgtcgacatttattattcggctgtaaaaggtgaaaaatttgtgtgtcctatcaaagaaggcactttaatggatatgatgtatatgccggatgcgctgaatgcagcgattacgcttatggaagctgatccgacaaaattgatacaccgcaatgctttcaatatcgcctctatgagtttcgatccggagacgatctatcaagctatcaaaaagcatgtgccggagtttcagatgatttacgatgtagacccgttgaaacaacgcattgccgatagttggcccgacagcctggacgacacctgtgctcgtgaagagtggggttggaagccggcttatgacctggaaagcatgacggtggatatgcttgaaaagcttagagagaaattaaaataatgaaaaaactaattgcaggggtcatattactcggtttactgggtgcttgtagcaataaaaaagctaagattgaccccttcgcatctattactcaagaggtggattctattcggcacaaagccgattcaatccacctggatgaattgccggaagatccgcagcctatacaggctgacgaatctttcgacgatttcatctataattttgcttccgatgatgtgttgcaacgtcagcgtgtgaaatttccgttgccctactacaacggagataaaaaggcgaatatcgaggaacgtaactggaagcacgacaacctgtttaccaaacagcattattatacgctcctgtttgataaagaggaagacatggacttggtaggagatacctctctcacttccgtgcaagtggagtggatattcgtgaagacacggatgatgaagaaatattactttgagcgtatcaagggagcgtggattctggaggctatcaatctgcgtcctatcgaacgggatgaaaacgaggactttgtggagttcttcggccatttcgctaccgacagccttttccagagccagcgtgtgtgtgagccattggcttttgttactaccgatccggacgatgatttctctgtgctggagactactctcgatttgaaccagtggtttgccttcaagccggcattgcctgccgaacgcctttcgaatatcaattacgggcaacggaatgatgacggatcgccaactaaaatcctggcactgaaaggaatcggaaacgggttttcgaatattctttattttcgccggaaagcaggcgaatgggagctatataaatttgaagatgtaagcatctgatgatagcgaatataacagtctgcatttatcgacatataacgaatagaataactatataactttaaacgatgtattctcttttaccctacaataccttcggcattgacgtcagtgccaaccgtttcattgaatatgcttcggtggaagaactgaagacgttgattgagcaaggtgccgttacgacaccttttttgcatattggcggcggcagcaacctgttatttaccaaagactatgaaggagtggtgttgcactcccgtatcgaaggaatcgaagtggcggaggaagacgagcgctctgtttccgtgcgtgtaggcgcaggtgtggtgtgggatgattttgtggcatattgtgtagaacacgggtggtatggagctgaaaatctttcactcattcccggcgaggtaggtgcaagcgctgtgcagaatatcggagcctacggcgtggaagtaaaggacttgatagcaaccgtggaaacggtgaacattcaggggcgggaacgcgtttattctgttgaagaatgtggctatgcctatcgcaacagtatcttcaaacgtcctgagaacaaatccgtttttgtgactcatgtctgcttccggcttagtaaagaggaacattatatgctcgattacggaacgattcgtcaggaacttgaaaaatatcctgcgctgactttgcctgtcgtccggaaaatcattattgacattcgtgaggctaagttgcccgacccgaaagtaatgggaaatgccggtagtttctttatgaacccgattgtgccgagggagaagctggaagctttacagcaggaatatccgggaatgccctactacgaactgccggaaggacgggtgaagattcccgccggctggatgatcgatcagtgcgggtggaaagggaaagccttaggtccggcggctgtacacgataagcaagccttggtgctggtgaattgcggtggagcgaaaggtagtgatataattgcgctttcggatgcggtgcgggcttctgtccgtgagaagttcggcatagatatacatccggaagtaaatttcgtctgaaagaaatgaaaataagaatacttggaagtggaacatcgacgggagcccctcagattggctgtacgtgtccggtctgtacttctgccgacccgaaagataaccggttgcgcacgtctgctattgtagagacaggcgatgcacggatactgattgactgcggtcccgattttcggacgcaggtcttacgcctgccttttgaaaggatagacggtgtgctgattactcacgaacattatgaccatgtgggcgggctggatgatttgcgtccgttctgccgtttcggttctgtgcctatctatgcggaacaatacgtgtcggacgctttgcgcttgcgtatgccctactgttttgtagatcatcgctacccgggtgttcccgatattcctttgcaggaaatatcggtcgggcagaaattctttataaatactacggaggtcatgcctttgcgtgtgatgcacgggcggctgccgattctgggttaccgcatcggacagctcggctacatcaccgatatgctgactatacccgaagaatcgtatgaacaattagccggaatagatgttttgatagtgaatgcactacggatagccccgcatcccacacatcaggatttggaggaggcgttggcggttgcgcagcgcattcgggcgaagaaaacatactttatacacatgagtcatgatatgggcttgcatgcagaggtggaacggaaactcccggagaatattcacctggcatacgacggattggaaatccttctttgatttccggtgaaatatttagcaaaagttttgttttctttgtagaaattattatttttgcacttagccgataaacagcgaatattatgaaacttcgtacgatagtgaaaatagcgatcacttcttctgttgtacttttgtgcgcaggtttcgctttgtactcttttttcaggctgtcggccgccgaaggaaaaaaggatttcaatctctacgaattggttccgccctctgcttcggcagtttttgtcactgatgacatactggaatttgtggcggaagtagacgatctggcttgtagtaaaaatcagcaatatcttcatgtatccaaactgttttcgtatctgaaacagtatctttatacccttcaggaagaagcgcctcacggattgagccggcaaatgaatcaaatgttgattagttttcatgagccggacaatattcataaccaggtgctatattgcagattgggggagggcgaccggcaactgattgaccgtttcgtgcagaagtatgtctcatctctttatccaccgaaaactttcaagtataagggagaggatataacgatttatcctatggcggacggggattttctggcatgctacctgacatccgattttatggctttgagttatcagaagaagttgatagaaaccgttattgatgctcacaagaccggaaaatcattggcggacgatcctacctttgcagaagcggccgccccgaagaaaagtccggcggttgccactgtttatgcccatttggaaggtatgatgggctggacggagtttgatatgaagctgcgggatgatttcatttattttacgggtgtctgtcacgaaacggatacttgcttcacgtttatgaatgtgcttcgtcagcaggaatcagtggaaggatttccgggtgaggcattgccttccaccgctttctatttcactaaacagggagtcacggactgggcatctctgctttcttatggagatatgcaggagacgggcgttcgtaccagtgacgtgcggaataggaatcgggagttgtctcattatctaatggagaatgccggacaggaactggttgcctgtcttttccagcgtgaagatacgttgcaggaagcggcggcggttctgagcctgtcggtgtcggacgtgacggaagcggaacggatgctgcgatctcttatcaacaccgtttctgccgaagaacggggaaaaacacccctgataactttttgttatactgccaataaagcttaccccgtctatcgcctgcctcaaacaacgttgtttacgcaactaactggttttgccgaaccgacatcgcatacatacgccacattttatgaagggcgtttgctgttggcgcccgatgaaaatagtctgtcccgttacatacgccagttggataaaggcgaggtgctcaatggagcgatagcataccagacaggaatggataacttgtccgattcctaccatttcatgttaatggcagacttcgatcatctgtttcatcaggcagcaaagcaaattcatttcgtgccggatttcttcctgcgcaactccgaattttttcgtaattttatactctttgcccagtttacttgtgctgacggagtggtatatcccaatattgttttgcggtataaatcggagtaaaatccattcggaaaactcatctgaaaggctgtttttctatacggaaaaaggacgttctcgaacaggaatatcctgactggaagagtggaaaaaactatggaaaaacaacggaaaacctgcaaaaaacaaataaaaaaaatatcgctcttttttcgaaaaataaaacttctgaaacgccttctggcagggcgcgaaaaccgaaccataaccgaaccataagccaagagaagagagtataagagaaagaatagaaacagaaagaaaaagaaagataaaactgctgttgctgttgctggttgaatttttttcgggggaactgctgttgctgatattgctttgtttcttccgtaagtcatgggcggatttttcccgtcccgcagcggagcgtcgtccggccccgggatgaagaacgcttagcccacggcggaatctttacaaagtgcgggtataaaaaaactcccggcaagaatcattctcaccgggagttttttatctgtatcgtcaagcggaatactttcggcttagaaaggcagatcgtccttggcatcacccggagtaaattccggagtagcggcaggagccggaggaggaacgggagcacccggagccattggagcacctgcgcctacacgctccactttccatgcacggatactgttgaaccaacggtcgttccactggcgggcgtcaacgtcgaatgatacggtcagttcttcgcccatttgaatgttgaactgctcgattttgtctgcgccaaacacgtcgaaacacattttacgcggatattggtcatggttttcgattacgtactcttgtgatttccactcgttgccgctagtttttgaaactccgcctctcggagagaggatagcgatgatttttcctgtaaattccattgcaataattttaaattctgcggcgaagttacaattttttagtaatatccttcacacaaagcctgtttttttcttttgtttttattgggtagccccaatcttttttcgtaactttgtgcgatagaacatttaaaacttaaaaacacgaaaatatatgaaatttatcgtttcaagtactgctctttccagccatttacaggctatcagccgtgtgattaattcaaaaaatgcgctgcctattctcgattgtttcctcttcgaactggaagacggaacattgtctgtgactgtatctgacagtgaaactacaatggttactaccgtagaagtgaatgaaagcgataccaacgggcgttttgccgtagtagcgaaaactttgctcgacgcactgaaagaaattccggaacaacctctcacgttcttgatcaatccggacaactacgaaataacagtgcagtaccagaatgggaaatacagcctaatgggacagaatgcggacgaatttccgcaatcggctacattgggtgacaacgcagttcgtgtggaaatggaagcggaagtgttgctggggggaatcaaccgctcggtcttcgctactgccgacgacgaactccgcccggtgatgaacggtatttatttcgatattacaacagaagatatcacaatggtggcttcggacggccacaagctggtacgttgcaagacgctggctgccaaaggtaacgaacgtgctgctttcatccttcccaaaaaaccggctacattgctcaaaaaccttctgccgaaggaacaaggctctgtgacgatcgaatttgatgaacgcaacgctgtgtttatgctcgatagctatcgcatggtatgccgtttgatcgaaggacgctatccgaactacaactctgtaattccgcagaacaacccgcataaagtgacggtcgaccggcaacagctgatcggagctttgcgccgtgtgtctattttctcgtcacaggccagcagcttgattaaacttcgtatgcaggagaaccagatcgtgatttccgcacaagatatcgacttctccacttctgccgaagaaacacaagtctgccagtatgcaggtgcggcaatgagcatcggattcaagtctacattcctaatcgacattcttaacaatatttcggcagacgaggttgttatcgaacttgccgatccttcacgtgccggtgtcatcgtaccggtggaacaggaagaaaatgaagacctgctgatgttgttaatgccgatgatgttgaacgattaatatacatttcacgacagaggacacggaggacacagaggataatttgaatgacattcctttcatttactctctatgtcctccgcgtcctctgttgtgaaacaaaatgaataaaaatgaaattaaatctgaaaaaccctattgtctttttcgatcttgagacgacaggaaccaatatcaacacagaccgaatcgttgaaatctgttatttgaaagtttacccgaacgggaatgaggaagcgaaaactctgcgtatcaatcccgaaatgcacatccccgaagcatcttccgccgtgcatggcatttatgacgctgacgtggcagattgcccgactttcaaggaagtggcaaagaatattgcccgcgacattgaaggatgcgacctggccggattcaattccaaccgttttgatattcctgtgctggcagaagaatttctgcgtgccggggtggacattgatatgagcaaacgtaaatttgtggatgtacaggtgatatttcataaaatggaacaacgtaccctgtccgcagcctacaagttctattgcgagaaaaatctggaagatgcgcacactgccgaagcggatacacgggctacatacgaggtgctgaaggcacagctcgaccgttatccggatcttcagaatgacatcgcattccttgccgattattccagtttcagcaaaaacgtagattttgcaggacgtatggtttacgatgataatggaacggaagtgttcaacttcggaaagtataaaggaatgtcggtagccgaggtgttgaagaaagaccccggatattacagttggattttgaatagtgatttcacgctgaatacgaaggcggccttgactaagatccgcttgcgtgaaatgagtaacttgattacgaaataatgctaaaaggaaaaaagataattcttggaattaccggcagtattgccgcatataaggcttgctatatcatccgcggacttatcaggcaaggagcggaagtgcaggttgtgattactccggcgggaaaagaatttattactcccattactctatcggctttgaccagcaaaccggtcatcagtgaattctttgcccaacgtgacggaacgtggaacagccacgttgacctcggactgtgggcagatgcgatgctgatagctcccgccactgcctctaccattggcaaaatggcaaacgggatagctgataatatgctgataacgacctatctttcggcgaaagctccggtgtttgtagctccggctatggacctcgatatgtatgctcatcctgccactcagaagaatctggagatacttcgttcttacggcaatcatattatcgagccgggtacgggtgagcttgccagtcatcttgtagggaagggacgtatggaggaaccggagaatatcatccgtgtgctggatgaatttttttctgcaaacggtgagctgcaaggtaagaaaataatgattacagccgggccgacttatgagaagattgaccctgtccgttttatcggcaactattcttccggaaaaatggggtttgccctcgcggaagaatgtgcacgtcgtggagcgcaggtgacactgatagcgggacccgtgcaactgaaaacacaacattcccgcattcgtcgcattgatgtagagtctgccggcgaaatgttggtagcgtcgaaaaaatactttgccgaagccgatgcaggtattctttgtgcggcagtagccgatttccgtccggaggtggtagccgataagaaaattaaacgtgagaaggaggaagaactgactctgcatcttcaggcaaccgaagatattgcggcaagtctgggagcgttgaaaggtaagaatcagttgttggtaggctttgccctcgaaacgaacaatgaacagcagaatgccgaaggaaagctcgaacgcaagaacttcgacttcattgtacttaattcgctcaatgatgcgggagccggattccgttacgatacgaataaaataagtataatagacagaaaaggccgtactgactaccccctgaaatcaaaaacggaagtagctcaagatattatcgatcgtctgtctgatgaattgaaactcttaattctcaacccttaactttcactgattcaaatgttacgttcattatacattcagaattacgcattgatagagaaactggacatcagttttgaaactggcttttccgttataacaggtgaaacgggggccggaaagtcaattattctgggagcaatcggtctgttgcttgggcagcgggcggatatgaaggccattcgccggggggcttccaaatgtgtaatagaggcacgttttgatatttcagcgtatggtatgcgcccgttctttgaggagaacgagctggaatatgatgaggagtgcatcttgcgccgtgaagtgcaggcatccggtaaaagccgagcatttattaatgatactcccgcatctttggtgcaggtaaaagagttgggcgaacagttgattgatgtacattcgcaacatcagaacctgttgctcaataaggaagggtttcagttgaatgtgctcgacattcttgcacataatgatgcggcactggagaaatatcactctcgttatgccgggtggaaacagactgaaagagagctgtccgagttaatggaactggctgagaaaagccgtgccgatgaagattatatccgttttcaactggagcagcttgaagaagctcatcttgccgaaggagagcaggaggaactggaacaagaggctgaaatgttaagtcatgcggaggagatcaaggcggggctttatcgggtggaacagtcttttgcttcggacgaaggaggattgctttcctatttaaaggacagtctcaatacgctgaataacttgcaaagagtttatcagcctgccaaggaacttgccgaacgtatggaaagtgcctatatcgaactgaaagatatttcgcaggaggtatcttcgcaaggtgagtctatcgagttcaatcctacaaggctggatgaggtgaacgaccgtctgaacatgatctattccctgcaacagaaacaccgtgtgcagacacttgaggagctgattgctttgacggaggaatatcgtggcaagttgtccgatatcacttcttacgatgagcgcattgccgaactgacagaacgtaaggaagaacaatataaacaggtcaagcagcaggcggaagtgctgaccaaagcccgtgcagcggctgcgcgtgaggtagaaaaacagttggcagcccggttggtaccgttgggaatgccgaatgtccgtttccaggtggaaatggggttaaagaaagaacccggattacagggagaagatactgtcagcttcttgttttctgccaacaagaacggtgtgttgcagaacatttcttccgtcgcttcgggaggtgaaatagcgcgtgtcatgctgtctatcaaagcaatgattgccggagccgtgaaactgccgactatcgtatttgatgagattgacaccggagtatccggtgaaatagccgaccgcatggcagacatgatgcaggaaatgggcgaacagaaccgtcaggttatcagtatcactcacctgccgcagatagctgcccggggaggggcccattataaagtatataagaaggacagcgatacggaaaccaacagccacatccgacgtctcaccgacgaggaacgggtagaggagattgcacacatgttaagcggtgctacattgaccgaagctgcccttagcaatgccaaagccctgcttgcccgcaactgataaatagtaaattataaaacagtaaattaacatagatgcttgataaaagtgaaatgattttcggcgttcgtgccgtgatagaggccattcaggctggtaaagagattgataagattctggtaaagaaagacattcagagtgatctttccaaagaactttttgcagctttgaaaggtctgctgatacccgttcagcgtgttccggtggagcgtattaaccgtatcacccggaaaaatcatcagggtgtggtggctttcatttcatccgtgacttatcagaagacggaagatctcgttcctttcttgttcgaacaagggaagaatccgtttttcgtcatgcttgacggagtgaccgatgtacgcaatttcggtgcaattgcccgtacctgtgaatgtgcagccgtagacgctgtgattattccggctcgtggcagtgcttctgtgaatgcggatgctgtgaaaacttctgcaggggcattgcatacccttccggtatgtcgtgagcaaaatctgcgtgcgactctgcaatacttgaaggatagcggtttccgtattgttgctgctacggaaaaaggagactacgactatacgaaagctgattatacaggaccgttatgcatcattatgggtgcggaggatacgggagtctcttatgataacctggcactctgtgacgaatgggtgaagataccgatgttgggaacaatcgaatccctcaatgtgtctgttgctgccggtatcctgatttacgaagctgtgaaacaaagaaacaacgactgatatgaagaagattttaatcctacctttggtgcttttctttctggtacagggaagcatggcacaaacccctaaatgggtggagaaggcgaaacgcgcagttttctctgtggtgacttatgacaagaatgataagatgctgaacaccgggaacggattttttgtatccgaagacggattggctttatctgattatagcctttttaaaggagcggaacgtgcggtggttatcacggcggacggcaagcaaatgccggtagacgtgatacttggagctaatgatatgtacgatgttattaagttccgtgtagccattaccgagaagaaagttcctgcgttgaacgtggcaaaagctgctccggaagtgggagccgatgcatggatgcttccttattcgacacaaaagagtattgcttgtgtatccggtaaagtgaaagatgtctccaaagtggccggagaatatcattattatacgttgggtatgcagatgaaagataaaatggttagttgcccggtgatgaatgcggaaggacaggtattcggtatttcccagaagtcctccggaattgatacggtgactacttgctatgcagcaggggccgcttttgccatggcacaaaaaatcaatgcgctttctttgggtgatgctgcgctgaaaagtatcggaatcaggaaaggactgcccgaagtggaagatcaggcattggtttacttgtttatggcttcttcacaaatgacggatgaagagtacggcaaactattggatgattttatccgccagttcccgaacagcacggacgggtatattcgccgtgccaattattatgtaactaagggacaggaagaccaatcttggtttgacaaggcggttgccgactttaataaggcattgaaggtagcacagaaaaaggatgatgtgtattacaacattgccaagttgatgcatgcttaccaattatcgaagcctgagaagacgtataaagactggacgtatgacacggctttgaagaatctccgccaggcaatcgctattgatccgcttcctgtttacactcagctggaaggggatattctgtttgcccaacaggactatgcaggtgctttggctgcttatgagaaagtgaacgccagcaatattgcttctcctgctaccttctttagtgccgctaaaaccaaggaattgctgaaagcggatccgaaagaagttattgtattaatggatagttgtatcgcccgttgtccgcaaccggttacttccgcgtttgctccttatcttctggaacgtgcacagatgaatctgaatgccaatcaggcgcgtaatgcgatgctcgattacgatgcttattttaaagcagtcaacggacaggtgaatgatatgttctattattatcgagaacaagctgccctgaaagcacgccagtatcaacgtgcattggatgatattgccaaggcgatcgaactgaatccgaaagacctgacttataaggcagagcaagcagtggtaaacctgcgtgtgggacggtatgaagaggctgttcaaatattgaataatatattgaaagaagatccgaaatatgccgaggcctatcgtctgctcggactttgtcagatacagttgaagaaaacggatgaagcttgcggcaatttcaataaagcaaaagaactgggtgatccgaatacggatgatctgataaagaaatattgcaagtaaagattgcttttttcgaagatataaaaatgaacccctgccagctttctcagttggcaggggttcttcgttttttgggggacatttctttaaaactctctctctctcttttctgtttttccccacacttgttaagttcaggttataggtcttaatgatatataggtttgatcattctacgtttgctttttatataataaatgcaggggattgggaaatactgcatcgtattaattattttttttagaaaaaatctttttcttatatttgtgctatataaaaattgatagtcaaatgaaaaaacctttgttgttattattgtgcctgtttactgtaataggctatgccaaagacccgcacattaaggctgtttatgccttaatagagcgagtcacacccggatatgggaaacagatcaaactgcaattgatcgaccccgccaatggagaggatgtgtatgaaatctcatcagaaaaagggaaagtccttttgaaagggaataatgccatagccctgtccactgcatttaaccaatatctgaaatatacgtgtaacgcgcatgtttcatggttgggtaatcaattaaacttacctgaaaatcttccgcttccccaaaagactatccgtaatacgatcaatggtaaatacagggtatacatgaattattgtacggtcagctatactgctgcctattgggattgggaacgttggcaacgcgaaatagatttcatggctatgaattctatcaatatgcctttggcaacagtaggattggaagctgtatggtataacacgttattgaaacatcggtttacggatgaagaagctcgtcgttttttagccggtccgggacatgctgcctggcaatggatgcaaaatctgcaaagttatggaggtccgctgcctaaatcttggatcgataaacatattatcttagctaaaaagataatagaccgtgaaagggaattaggtatgacaccgatccaacaaggattctccggttatgttcctcgtgaattgaaagataaatatcctgaagctaaaattcgcctgcaacccggttggtgcggatttaaaggagcaggacagcttgatcctaccgatgcgttgtttgcagcattaggccgtgattttttagaggaagaaaagaaactttatggcacgtatggaatatacgcagcagatccgttccatgagagtgcacctcctgtcaatactccggagtatttaagcgcagtagggcatgccatatataaattaatcaaagatttcgacccgaaagctaaatgggctatgcaggcatggagtttgcgagaaccgattgtaaaggctgttcctcagaatgacctgattattctggacttaaatggagaaaagataaagggccgcaaaggcttttggggatacccggctgtggaaggaaatttgcataacttcggcgggcgtattaatatgcatggagatttgcgtttgctggcctccaaccaatatatgacggctttaaaacagtatcccaatgtatgtggctccggtttgtttatggaagctattgaacagaatcctgtatattatgatttggcatttgagatgcctttgcataaaggggaagtagccattgaggaatggcttaagcaatatgccaaccgacgttatggggctgtctctccctcggctcagcaagctatgatttgtttattggagggaccttatcgtcccggtacaaatggtaccgaacgaagttctatcattgctgcacgtcctgctcttaatgtaaaaaaatcagggcctaatgcgggattgggaattccatattctcctttattggtcattcaggccgaaggtttgttactcaaagatgccgataaactgaagaattctgaaccttatcgttttgatgtgatagatgtccaaaggcaaatgatgaccaatatgggacaagttatccataaaagagctgccgaagctttcctgaatagagacaaagaggctttcgctttgcatagcaaacgcttcttgcaaatgctggaagatgtggatgagctgcttcgtacacgtcctgaatttaattttgaccgttggctgacatctgcacgaagttggggggatacggaagaagaaaagaacctgttagaatatgatgccacttccttagtcactatttggggggcagacggagatccttctatttttgactactcatggagagaatggacgggacttattaaagggtattatttgccgcgttggacgaagttttatgccatgcttcaggaacatctcgataatggaacaacctattcggaggagggattacgtcagacgcatggacgagaggctttccgtgccaatgatttttatagtaaactgggggattgggagttgcaatttgtatctacccccaataaggcacgtactccaattgtacaaggggatgaaatagaaattgccggtcggatgtataagaaatatactgctttggccaaagaatattaccaggacttcaaagcagatgcaatcaaagacggtaaaacgtatgagaatctaggggaataatttctatatacccacacataaagagagaggataaatcatttcttaataatgtttatcctctctttgtttatgatattataactgaataaggcaggggttattgagattacaatttgcatattttctggaagaatatctgattttcatgtaaaacagtaagtattccataaatagtatgttcggtttaatgaaaatcttgtatattccgtgatattttcactcattaatataatatgaaatgaattatgaagaaaaatcgattttctacttgtgcaagtaactatattgattgtttgcgaaaggagggccgttattctacggcccatgtgtataagaatgcggtccgttctttttcgcagttttgtggtacgcagtctattgagtttaccaaaataaaccgcgaaaacttaaaaaggtatagcaattacctgacggcctcccgtttaaagccaaatacgatatctacgtatatgcgtatgttgcgttgtatctataataggggagtggatgctcgtcaggctccgtatgtacatggcttgtttcgtgatgtgtttaccggagttgatacccgccagaagaaagcacttcctttgagtgagcttcatacgttgcttaacaaagatccgcagacggagacacttcgccatacgcaggccattgctaatttactgtttcagtttggtggtatgcctttcgttgatctggctcatctggagaagtcaaatttgaatcaggggctcttgaagtataaccgtatgaaaaccggtactcccatgagtgtggagattatagattctgcttatgagttactttctttgcttcgtaataatcatagttcatcttgttccgaccgtcccgattatcttttccatatattgagtggagagtataaaaggggggaagaaggtgcgtatcgcgagtatcagtctgcattacggaaattcaataatcatctgaaaagtttatcccgtaagctgaggttgcattcgtctgtaacatcttatactttacggcattcctgggctactactgctaaatataggggtgttcctattgagatgatcagtgagtcactagggcataaatcaattaagacaactcagatttatttgaaaggtttcgaattggaagaacgcacaaaagtaaataaacaaaattattattacgttagaagatttaaaatagcctgaaggaaaaggtttaaaatgctaagatttaggggcttagtattactgttacttcttaagtaacggatcatgcatttgcagacagcagctaacaacaaaaaaaggaaaatgaaccgcgatgagggtgggacgatatggaaacctaatattcgatatgaaagtattccgaaattaggcaataaaaggtcatagagcatgaaagcaaaatcttcatgttcagatacttttttattatgtatttaagagaaaaaggaaaaaaagaagtttttacttgtatgctattagtatttttacctatctttgcaccgaataaatttccgttacttaagaagtaacagataaacatggggtaaaaaaatatgatttttcaagaaaagaaatcagtaaatgccgggcctagttgtgggacaggggaaggcgtagcacactcaaaacgttggtatgtcgctctcgttcgtatgcatcacgagaagaaggtatccgaacgtttatccaaaatgggaattgattcttttgttcccgttcagcaacagattcatcaatggagcgaccgtcgtaagctggtggataccgtcttacttcctatgatggtgttcgttcatgtgactcccaaggagcgtatggaagttctttccttttccactgtcagccgttatatggtgatgcgtggtgaaagtactcctgccgtaattcccgacgagcaaatggcccgtttccgtttcatgctcgattattctgatgaagccgtctgtatgaatgactctcctttggcccgtggtgagaaggtccgtgtcataaaaggtcctttgagcggtcttgtcggcgaactggtgactgtcggtggccggagtaagattgccgtccgtttgaatatgctcggctgtgcttgtgtcgatatgccgatcggttatgtagaacctattcacttaatcaatgatacttcgaaagtttagtgttttgttattgatccttctgtcgggatcatctcctcttttcgctcagagtatgagcgactctcaagtattggaatatgtcaaagaggggattagacaagggaaagagcaaaaacagcttgcctccgagttagcccgcaagggtgtaaccaaggagcaggccctgcgtgtgaagcagctctatgagcagcagaacaacgtgaacgtttccaacgccacgggtacggatatcaacgaatcccgccttcgtgaagagatgaaggagaacacctcggatatgttggaggaccaccctagtacccaagacctcgcacgcggtaatcaggtcttcggacgtaacatcttcaacacccgtaatctgaccttcgaacccagtgtcaatatcgccacccccttgaattaccgccttggccccggtgacgaagtgataatcgatatctggggggcgagccagaatactatccgccagcagatctctcccgacggcactatcaatatccagaagataggccccgtcaacctgaacggacttacgatcgctgaagcgaacgactatctcaagaagacattaaacaagatctataacggtcttaataatacgaacgacccgacctctgacatccgtctgacactcggcagcatccgtactatccagatcaatgtcatgggtgaagtggtccagccgggcacctactccctttcctcctttgccactgtctttcacgcgctttaccgtgcgggaggtgtgagtgacatcggcagcctgcgcaatgtccaactggtccgtaacggcaggaacatcgctacaatcgacgtctaccagtttatcatgaaaggtaacattcaggacgatatccgtcttcaggaaggtgacgttgtgatagttcccgcttatgaggtactggtcaagatcgacggcaaggtgaaacgtccgatgcgttttgagatgaagaaggacgagaacctttccacgcttatcagctatgccggcggctttgaagccgacgcctacacccgttctttgcgtgtggtccgccagaacggtcaggaatatgaagtcaacacggtcaaggacatggattacagtgtctataagatgcgcaacggcgatgttgtgacggccgaagctatccttaaccgcttcatcaacaagcttgaaatccgcggtgcggtctaccgtcccggtatctacgaactgaacggcaggctgaataccgtccgcgaactggtcaacgaatcccagggccttaccggtgatgcgttcctgaaccgtgccgtcctttaccgtcagcgtgaggacctgacttccgaagtaatccctttggatatcaagtctatcatggagggtacttcccctaatcttcccctgatgaagaatgacattctttatattcccagcattcatgacctggaggacaggggtaatgtggtcatccacggtgaagtggctcagcctgactcgtatccttatgcggataacatgacccttgaggacctgatcatccaggcaggcggtctgcgtgaagccgcttccgtagtccgtgttgatgtatcccgcagaataaagaacccgtatagtacagttgataatgatactatcggtcagatgtatacgtttgccttaaaggacggttttgtagttgacggccgtcccggctttgtccttcagccctacgatgaggtttatgttcgtcgcagccccggttatcaacctcaacagaatgtttcagtcgaaggagaaatacttttcggcggttcctatgcgatgaccagcagggaggaacgtctttcaaacttgatcaacaaagccggcggagccaccaactacgcttatcttcgtggtgcgaagcttacccgtgtagccaatgcgagtgagaagaaacgtatgggtgatgtaatccgtttgatgagccgtcagttgggtgaggctatgcttgattccctgggtgtccgtgtggaggatacgtttacggtcggtatcgatttggagaaggcgttggccaatcccggaagtacggcagatattgtgttgcgtgagggtgatgtagtctccattccgaagaataataatacggtaacaatcaatggtgccgtcatggttcctaatactgtttcttatatgaaaggcaaggatgtagactactacctgaatcaggcgggaggttattcagagaatgcgaagaagagtaagaagttcattgtttatatgaatggtcaggtgactaaggtgaagggtagtggtaagaaacagattgaacccgggtgtgagataattattcctagtaaggctaagaagaaaactaatattggaaatattctaggctatgctactacgttcagtactttgggaatgatggttgcttctattgctaacttgataaagaaataacaaatacttctatggttactctgatagaacgagaatctaaaacagaaataaaacagggacaagataatcatacagatgaaaaggcagaaatcgatttgatggatattcttcgtaaaattataggtattcgtaagataatctataaagctgcgggtatcggattgttaatcggtgtaattgtcgcaataagtattcctgaaaaatatacagttggagttacactttctcctgaaatgggaaatactaaaggcggaggtttatccggtttggcagcttcttttttgggaagtggagtttctatgaatgaaggcactgatgctttgaacgcttctttgtctgctgatattgcatcttctactcctttcttgttggaactttctaaaatgaaagtccctgtatcagggagtagggaaatatctttaagctcatatttagatgaagaatcttctccctggtgggggtatgtgattgggtttccaagcatggtaatgagtggggtgaagtcactgtttattaaagaagataaaaaaatagtttctaatagagtgaatcaggggatatttgaattatctaggaaggagttacagaaaattgaaactttaaaaaatatgattattgttactgtggataagaatacatctatgacttccgtaactgtaactttgcaaaatcctaaagttgctgcaatagttgctgattctgttgtagggaaattacaggaatacattataacttatcgtacctctaaggctaaagaagattgcctttatttggagaaactattcaaagaacgccaacaagaatattacatagctcagaaagagtatgctaattacatggattctcatgatgatattattttacaaagtgtgcgtacggaacaggaacggttgcagaatgatatgaacttagcttatcaagtgtatagtcaggttgctaatcaacttcaagttgccagggccaaagttcaggaagaaaaacctgtatttgctattgtagagcctgctgtagtaccattgtcaccttcgggaatcagtaagaaaatatatgttttagcttttgtatttctattagtggggggggtgatggcttggacattttttggaaaagatttatttaatcaattgaaggaaatttcagcttaaatttatcagtgtaacaattattagtatattaatttcaaagaaatcattttcattgagttgagtcttttttcagtataaaatatttaggatatgttgttggattgaaaaaacagtgagtttaataactattgtttgtgtttttttagctgattgatttttaataccaatatatgagtaagtcggtgattatatttattttgataactattaaaatgatgtatgttaaagcattaagattctgctctaaaatatgttcttccttatatataggatggaacaaaatatatttctttttgaataatataaagtatggaaagaattttagagtatttaatcatttatatttaaaaattcatgtaggtgcattagtacaaattggtaataattgcactattatgagtggtgcgggtttaaatcctttaagtcgtaatattaaaacttgtatatatgtgggtaaaaaggctactctaaagctgggtaatgatgtaggtataagttcgtcaactctttgggtaaaggaaagcgtttcgattgggaattctgtggctataggggcagattgtattataatggatactgatgcccataatctagattggaaaataagatgttctgaagaaactaatgaatatggagaatcggtggatatggtgactgctgcaagtgctcctatagttattgaagataatgtacttgttggagcaagatgtattatattgaaaggagttactattggtgcgcgtagtattattggtagtggtagtattgtaaccaaagatattccttctgattgtattgcggctggaaatccttgtaaggtaataaagagtatagtatattaaggagaatttgatatgtcggaaacacgttcatctaatttcgaatgtcttagaattttagcaattatactgattttgataatgcattcttatgctcaagcgaattgtaaggaaaacttgtttaatttatttgtaggatatgtaatatctgcaataggtaatataggtgtatcttgttttgtattgttaagtgggtattttggtgtgaaatttaaaatgcagcgttttatacaattaattttaattactactttttacactgtaatttcttttatcgcaaatcatggttggctttttaatatttctttttttgattcattgatagtagttttaagatataagaattggttcattgcttgttatttaattttaatgctactctctccttttataaataaagcaatgctcgctctttctaaaatggagtataataggttgttgattattttgtttgttacgttttcggtattgccaacattgtttgtatcttactattatacgatattgacggatggtggtaaatgtttgacatatattctttttttgtatataataggacgctatttgtctctcttttattctgaaaagaaaatttcaaaatcattatgtctattgtctttcttgtctttgaccattcttattgttatgctaaatgtaacgattagttatgtttttcataaagagtgtagaattttctctatggattgctctccattggtacttttttcttctttatgtgtatttttcttttttaaaggtcttgcattgaaatcgagattggtgaatagtattgctgcaagtgttttggctgtgtatctattagataatcttcgtttatatgtttctgatcatatttttgatataacattgtatgcagaatcaaatttttttcttctttatttaatggtgtttgttattgtagtatttgtgttagggatagtgatagataaaataagagtttttgtttgtggaaaatgtgaaaattatattataaaaaaatatataagtatattgaaattagttaaaatgaatttattatgaaaattgcaattgtcccttttcatagtgggctggctaatgatatattatttgataaagataatgagtctactaattctgatgatttgataactccctattattatattaagcaagaatacgaaaagcgaggtgtttctataaatacattagatcaatataatacgttagacagcctagattgtgtacttttctttaaacttgattataatgaattgatacgttgtattaaatctaaagtaaaacgattatattattttgcatgggaaccagaagttgtagataatcatcattctaaaaagaatttggcgaaactagaacctttctttaatgtaatatttacgtggaatgacgatattgttgatggaaacaaatacctgaagataaattatccatatcattttacaaatgtaatagaatgtcctactagagagaattttgaaaagaggaatttattagttaatatttctggtaataaaatatctttccaacataatgagctttattctgtaagaagaaaagttatatctttttataataaatatagttgtacttatttttcattgtatggacggggatggctaaagaatttgagagtttataaaggagtatgtataagtaaaaagaaagtatatacacaatttaaatttgctttgtgtttagagaatatgtgtaatgtgaatggttatgttacagaaaagatatttgattgttttacagctggaattgtgcctgtatattggggagctagtaatatagaaaaatatattcctaaacaatgttttataagttatactgatttcagttccattgacgatttgaatcactttcttattaacatgagctatgaagagtattgcaattatatatgccatattaaagaatatttgcaaagttcggctaaatctgtttttgaatataaatattttatgagacaacttgattctgctttgatttcgaatatcgaaagagaatgtaacaatgaagtggctcttgcattttattccatattacaaaatatcagtagaaaaccaaaagcattgtttaatttgacgaccaaattaattgttgattattgtatgtaacaaaaaacttaggtctgttctttatgaactcttcacgaattattagaaatacgggatacttatatctaaagatggctattacaatgtttattacattgtattcaactcgtcttttgttagaagctttaggggtagttgactttggaatatttaatgttgtaggtggtctaattgcaatgttgggatttgtaaataattcaatggctgttgcaactcagcgttttatgtcttttgcagagggcgaagataatatgtgtaagaagaaatctatttttaatataagtattgttcttcatttttttttagctataatagttggtcttatattacttcttcttcttgtctttttctttgattatgtatttaatataccgagcgaaagagtttatgcaggaaaaattgtcttttttagtttgattattagtactgtgttttctatgatgtcagtaccttatgaggcggttattaatgcacatgaagatatgggatattatgcagttgtaggtgtttttgagtctgttcttaagttattcatcgcttttattatttgttggactttacaagataagctaattttatatggtattttgatgactctacttccaatttgcactttaacaattatgagaatattttgtcatcatagatataaggagtgtattgtttcaccactacaatattggaataaaaatatattaagagaaatggtatctttcgctggttggaatttcatcgggatatcaggatctatgataggtagttatggcagaggaattatattaaatcatttttttggcgtagttgtgaatgctgcttatggtattgctattcaaatcaatggacaaatactttctttcacaaataacatgttaaaagctttgaatcctacaatagccaaaagtgaaggatcaggagaaacagaacgaatgattagaatctcgttgaaaggatgtaaattctcatattatatattggctttttttgctatacctttaataatagaaatgcctataatattatcactttggttgaagaatgttcctccttgggctgtggtctttggtcgattgactttaactaattctttggtagagcaaatgacaattgcgttggggacatctcttttagcaataggaaatataaagcaatttaatgttatgacaaccgttttaaatgttgtttttctggcattttgtggggtgttgttcatattaggtttttcgccaataactatgtatgtattgaatataattttttgtggcgttttgacttcatgtttgaaaatatattatttgagtaaatactcggatatgaaatattcactattcatgaaagctgtttttatgccggtagtaatagtatctgctatttcttttataggaggaatgataccatattacttaatagaagatagttattatagagtagtatcaacttttattattagtagcgtatcttttgtttgcgctacttactattgggggcttttgagagaggaaaaaaatgttttatggaatgtattgtctaatttgaaaaataaagtttatggacgtttataaaaaaggttctataagacctactgttaatttgaaagtaagaatattactcttattatattctatatctccatttaataagatttcttatcttagaaattctcttctccgaagtttgcacttacccctttctacttctattactaaaggattcttttgtttatcatataatttatctgttggagagaatactggattaggtgatacttatatacgaaacatagctatggtaacaatcggagaaaattgttcctttagttatagaaatatgatattaactggtacacatgatatatctgattatagtactataatagcgaaacctgtagttattggtgataacacatggattacaagtaatgttactatattacctggggtaacaataggaagtaatactataataggtgcagggagtgtagtttcaagagatattccatttggggtttttgccgcaggtaatccatgtcgtgttattaagagaattgattttagaaaatagctataatcaaaatctctctatatcgatgtcaggagaaaataatgaaagtgatattgcttggtgatacaaatactgataatactagtattgttttaataggtaaagattgcaaggttattattagtgaagggtgttcaataggtggtggcaaattagtgtgtatgggaaatagtaactttattcatatagttcctaattgtatgttgtctaataaaattaagctgtgggcaacagacactcattctatttattgtgatgatattacaattccaattaaccaatctaaatcaataattctagaagaacatgtatgggtggttaaaagagcaataatattaaaaggagtaaagattgggcataactcctcaatagtaggtatgggaacagttgtgactaaagatgtatcttgtttatctttagtagtaggtaatccttcttgtatagtaaggagcggtgttacatggagtatggatagaatacttatataacatatagagtaatgaagattgttcagattataggtggtttgggtaaccaaatgtttcaatatgctttctataaggctttgcaaagtcattataaagatgtagaaattgatacttcgttattttcgtgttataaacttcacaatggttttgaactagcaaaaatatttggagtacagtttaaagaggcatctctattgaaacgtatgcaattatcttttcatggaggagatatcctttcaaggatattaaaaaaagtgattcaacaacggaatacagagtgtattgaagaatatctcaaatatgacaaacgcgttttagataattcgtctaatctatattacatagggtattggcaaagttacaaatatttttcttctatagagagtgagttaaggaagatttttacctttccaaattcgataatagataactataataaaaatctcagtgatgtgattttatcttcaaattctgtcagtcttcatatacgtagaggagattatgttggtaattctatatatgaaaatattgccacattggattattatcaaagagcattggactatatggataagaatgttctaaatatgaagttatttctcttttcaaatgatgtggaatggtgtttgaacaatttgaatttaaaaaattgtactgtggtgtctcataatactggtacaaattctttttgggatatgtatttaatgtcttcttgtaagcataatattatagcaaatagttcgtttagctggtggggagcttggcttaatactaatcccggtaaaatagttatatcacccaaaaggtggattaatgataaccgtgtaaacattgatgatattatacctgaaacttggatctgtttatgaatactaaacctttcgtttctgttgtgatgtctgtttataatggggagttgttcttgaaagaagctatagacagtattctatcacaaacatataaaaaatttgagtttattattatagatgatggttcgacagatggctcgttgaatatcataaatgaatattcggatgaaaggataaaaatattggtcaatcctaaaaatgaaggtttaatattttctttaaataaagggattgaacttgcattagggacttatattgtgaggatggatgcggatgatattagtcttcctcaaagaatagaagaacaagtgtcttttatggaaaaacataaggagataggtgtttgcggtacagatatagaggttttcgggaaatcactaaacggttatattcatcgttttaaacggagtccaatagctaataatgctgcccttttgtttactacttgtttcgctcatccttctgtgataattagaaagtcggtattagatcaatatcatttatgctataacggagtttatcgaaatgcggaagattatggattttgggtagaactgagtaaatatacacaatttgctaatataaataaagtattgttgaaatatagaatacttcaagggagtgtaactagagtagcaaataaggatttggaatcccggtatgaagtacataaacttatatatcaaaactatttgttatataataatatatcattatctaatgaagaattatggattcattttctcatatcggataatgaacggtttactaaatcggaatatgttaatactcctagaatagtatatcaacacttagaaaaattgatagattactataaacacattgataactttttcgtttttgcttgttcgatctatcaaagaggattaagtatatctcgttggtttccatacaggtataagttttatgtgttgccgttattatgtaattatatttattacaaattgttatctcgtattaaatgcttccatacctttttcttataaccttagtttcattttgttctgttttagattatgtaaaactgaatacaaaaagtcggaagattctcttggttctacttattggtttgttaatcatgttttgtggtactagatttgaaacaggtaatgactggacggcatatgttgatacatttaataggataccaccttttgaaagtttatgtaataacccggaaatgtttgttgtttctagaatggagccaggctatgtcattttgaatagtattgtgaaatcattgggaggcacgatagatattgtttttttgatttcgtgtattattactgttggcttactttttattgctttaaataggtattcttttttttgctttttagctatattgctttatatgagatatggatatttacaagcgaacatgatgtttgtcaggcaaggtatagctgtttcaatattttttatttctctgaagtatgtagaagaacgtaagttttggcaatatattgcaataaacattatagcaattttatttcattcaagtttgtatattgttttgcccttatatttctttttgaataggagatatagtaatagaactattattggttttgtaataatttcaatattactttcatttgtaaatatagtaggaacgctgaactcttatctcccttcttttataagtgagagcattatggaatattcaaagcatgaggtttggggggggatgactggtaagattaatatagctttgattgagaagtttattctattactactttgtttaaagtaccgtaataggctttctgaaaataaaagcttcaatctctttcttaatatttttgttttgtctatcatttgttattattcattctttcaaatgtatatatttcaacagagacttgtatttatatttcagctatcaactattggtatttgggtattgttattaagaagttcaactaaagaaactcagaagtggttaacattagcacttaatattttagttgtatatttctttctacattatgtatttactagtgctaacgtgtttataccatatcggtcatggatagtttgaagattgattttttagtagctacaattaatagaactaattgtgagttcttatatcctatatttaagaatatagatttaaatgattgtaatgttatagtgataaatcaatgtattgatattgctgtaccgctaaatggaatttctacttttcatgagaatatacatctgatttcagtacctgataaggggacttctaatagcagaaatttggcaatgctacatatgaaaggcgatataggagtttttctagatgatgatgtggtattggaacatgattctatgattagaatagcaaatgcctatatagaacataaagatgctgatatcattacatttcagtcgcaatatttctcaggaaagtatttcaaatcttatagtgataactctttcaaacataataaatatacattgaaaaatatctcagacatagaaattacattcaggaagactataatagaaaagaaagttttgtttaataccctttttggcttaggtgcaaaatttccgttaggagaatatcttatattcttgacggattgttacaatgcagaaagtaatatgtattatgtgcctggagttattgtaaaacatccagattgccttcattctggtattcaatttattcaaaattatgaagaaggaagaggtgccctattcgcttgtttgtctaaatatttatttccatttatgatcttttattttgctataaggaagtatagtatgtataaaaataaacattctttttggagagaagtgtattttatgtttaagggtgcgataaaatattttctttgttgaaacatggaagtattatagctataataatttgtttggcttttgttattaatgaggaatggatatcctattcattttttgagaaaattgtaattgctccaaaattgtgggcacattcaccttatggaaaagaaattcagttgaagagttggcttcttttttgatatgaaagacaaagtttctattattactccttgttataattcagctagatttatttctaaaacaattgaatctgttttaaatcagacttatccttattgggaaatgattattgtggacgattgttcacacgataatacgaaagaagtagtagaacaatattgtaaactagattcaaggattcgacttttgtgtttggagaagaactctggttctgctactattcctcggaataaagctattgaggaagctgaaggacgttttatagcttttattgatagcgatgatttatggaaacctgaaaaactagaaagacaacttcctttttttaatacatctaatatagctgtagtttattcaaattatgagaagattgatgaatcaggaaacagatatggacgagtaatattagctcctaaaagttgtacctatcatcaattactttgcggaaatgttataggttgttctacaggagtatatgatactttaaaaacaggaaaacatttttttgtatctgaaggtcatgaagactatatattatggctttccatattaaaaaaaggttatttagcagtgaatacgcaaagctgtttggctgaatatagaattcgaaaatcttctttgtcttctaataaaataaaagtacttccatgggtttggaatatttatatgaatattgagaaacttggatactttagaagtgctttctatttcattaattacgcatttcgcggcatttttaaatatatcaaataaacggtattgtatttaaattttctaattaaattattatggggtatagtgaggacttcattccggacggaatgaatgcttttgagcgcaatgtaaagcgaataggggattgtatcgttgcagcagttttaatgatcgttttttctccgttatttttgatttgctatatagctgtgaaacgggaagatggtggggcagctatatttaagcaagagcgtatcgggcgtttcggacggccgttttatatctataagtttcgcagtatgcgattggatgcagagtctatgggccctcaactttatgcggggggaagagatgttcgattgactaagataggaagatttctacgcgaacaccatttggacgagttgccacagttgtggaatgtcttctgtggagatatggcttttatcggtccccgtccggaacgtaaattctatattgatcagattattaagcatgatccccgttatcagttcttgtatcagattcgtccgggagtgacttcgtatgcaactttgtataatggttacacggatacgatggacaagatgttacgccgtttgcggtatgacttgttttatctgcaacatcgctcgtggtggtttgactttaaaatattagtgaagacttttataaacatttgctttggaaagaagttttaagagtggtataaaataaaatgttgagatgtaatcagcactaatagagtgtttgtatgtgagatgaagagaatgtaggtccctagtttcatgctgaacgcatgattctcctacatttgtgaattagaaagagtacgacggtacctttctaatttacgccctggcaccggaggtgtatctggtgttaatttcccacgatatcaacggtctgtgaagatagttgatattttctttttattctcattatatcggataatagtatcttctttctttgtttatatgtttaatcttttataactttatagcatataaaacagtaataaagaaacgatggaacattcagaatttgtagtgaaatgttataataaacaagagttagcccagatgtattttcctgatttgactatccgtgcttcggtcaataaacttcggcgttggatgcggaaatgcaagccattgatggatgagatactggctacggactttcatccgaaaacgaaagctttttctgtgagagaagtacggcttattacctattacttgggaaagccgggagatttataaatgatataaacataaaaagaactacgggagactgcacgttcgacagctcccgtagttctttttatatatccatatactccttgcgacagtcaaaacatggacaagctttatgaatcgaagcactgagttgataatgccccaggatttgcgcttccggatactgatgtctgagtatcgttaacaggtcgagcaatgcaaagcgctgcgcttgggttcttgtatctgccggacacccattttcgtccagtccgccttcatagcaaatgcctatgctgtgccggttgaagcctctcacgtgtgcacccggctctgatatcggacggcagtgatgaagctctccgtcccgggtgatataaaagtgatagccgatatccttaaatccgcgttgcaggtgacattgccgaagttgttctacggtgaagggaacattgcagcgcgttgcgctgcaatgaatcaccaataacttaatctcacgggggagataattatcttctggtttttccatatagatgatcagaagattactgtcccatacaggatgttacacccaaggccgaaatgaccgacgttgcaatagttacaataaactggagaatgtttttccaaagttgctttttcatacgaatttaaattaaagaataaatacttatacattttgaactcaataacccaacaacaatcggttgattatactgacggatccggagttaccccactgccggaacctccttgattgtcgtcaccgtcatcaggaagcggatctttgtccgaatctgccgaagaatcgttcttatacaatgtataatccagcgtcttacacaatttgcggagatcacttccgggataaaagagtactttgcccttatcgatgcacgatgtcttgaattcctttaccgtatcggtaggagtgcccgttttgatgctcatgcggaaattgcccaggtcacccatttgggcgatatttccttcatccagtacgttgactatttcgagcaggaactcaccgatacaaccttccagttctccttttgaataagaagaacgttcggagattcgtttgcagacttccttgacagtcactttacgaccgctacgcgccactgcatagtacttcggagtttcatcaggtttcaataggttcttgcgagccatgagagtgtaattctgtgccataactttttaaattttaattgttaatttctgataactttgtaatcgattacatgacaaaagtaatacatcggggaatcggcatgacgcatagtgacgtatacaggcgcatagataaatagaaaaaacattgggagatttgtatcgaaacttcccaatgtttgatttcaattattgagatgtttttttcaaatcctccaatgtttttccgattttccaaaaggacaaaaggacaaaaaagacagttgtgactattgcttgttcaacttgatataggaaccatgagatatcttactgatctttattccgttaagcgattttagaagacgtgttaccttacggagattgaaatcgtgttttgcgccgagccggatcgcttcgtctgtagtgaagctatttggcaactcattgacgaaattgcgaataacgttcggatttttcagtggacggaccgaagggacaggcatggatgagtgtaacagacggctatgctcgtaacaacacaggacaatttgaagagaacgctcgaaatcagcatctatacaataaatctcgggagaaagatcattagcttcaaattgccggatacgggtttgaatcatgctgatacgcatcaccagaaaggcatagcgcttcactacggcttggagatcatcattgccttccatggctacctcggacagcatgtgtgagaaaatctcattcagacggtgccattgtggacgggtgaaatgaaatagaacaggatgggccaggcagaaattatatagttcgtagacacgatgagcaatcggcttgaaagagtcttctaatgaaatgcaatcatcgcccatttctttccagtgaggaatttcacggaaagtgtaagtcagaatacggctggggagtccgttcccgcaactgcttagcaaactgtctatctgtccgggagtacccgtcagaagtaaggctaatttaggatgacggatataaaccggactgataccgttggctttataggaagaatcaatgttttcgtgctcaaaagctttgcggagcatatcgtcgaagttcccacaatccagatgattggctgtggagagtgtttgcgcttccgtatcgaaaatgatgcttccctgcgaaccgttgtcctgcatctgaatttgcatgcgggtgtaactggtagtggcggggatgaataacatcttgaaaggaggtctttgaggttcttcggaatatgtatctccttttttccttttttgctgacattctgcttgccaagtgttgtgcgctgtatggtagtttttttgcatggattcactggtagacagtatttcggcctgtatttcttccaataaatagcgtccggtttgagcaatgcttttgccactaccggcagaagaaaagataacacagaacaaatgagtggaatactttttgtgattataaattccaaaagtttgtggaagtaccgcacttagcgctgtgagatcggaaaggagggagatgtcttgctcgcggtcactcgcgtcttcgatgatgcaatcattcagtaggtcgggaagattattgtacaaatcacgaggaaataaaggcgtctcttttctgaattcttctcccagccaataggcttcttcggtgctgtcggagttttctaaagtaccataggggacttttgtccttatgtctttttgacagggggaataagctggtggaactgttgcggatgtctgattgttaacttgtttgtaaccagatgataatacgcttgtcagttcttcggcacgaaaatctgtgtgctcgaaaaagactgttagcccgcataatatgctttcttgcggatagtggcggcggcaggcttcacaggctagtttgaacacgttggaatggcgttgcccggttgttaagggatgaaggaaaatataggacgaaatgaacttgttgatttcgtcttcagaagtattttccgtagggttgttttggagggggaaaggaggaagtttttcattttcggaagaggagttttcttcttttctcattaatggttccaaagtaaatgcctgatagagactggcaacgtatccattgggagaataactgaaataacacagacggctttcgtccttgcatgccggatcactctccagacccagcaactgattgtagtaacggctcaccaattgctgaccttcacgatggcggccttcgatatcttctacataggcgaagactttcacaccgtcggtcggactttctatggccgctaccgtatgcgggtctgccgcgcaacgttgaatgacttccagacgattttttacgtggtcgtaatcgagtccgacaatatgactggggaggaggaagtgtttgatagcatgcgctccattgaatgtacctgccggagtgaagcaagggagttgatttttcaatttctgtgcggcagcatgatctccatctgcataatatctacggatggtgttgataatcgttgcataaacaggatgaatacacataataatgacttcaaggaaagacatgactttgggcttttttgaatacacattttcataaaccgagactttgatttcttctagaactttcatataaaattgttttttgtaagattgtgctacctgactatcagatagcgggagcaaaggtcggtatattaaaaatagggttactttcctatgtggaaagtacttgataaagcaaatataaactcaaaaatttaaaattattaatcataaaatgacatggcgaaagaaaaacaaaaaccttatgagtttttaagcaatttggtattggctttaatggatacagatagcgcatttattaatgcattttttatggatgaatttgctatttcctcaaaaacgttggggggaataagacggggagaggatatgtgtatttatcagtatgtacgagtgatccggtgtatgacgaagtatcttcatttaatgattcagctggatatgttgctgaaagaattaagaattgtactatcttccaattgtgacttggtggttgctacagttcctcactgttctcacggaacttgtcagccgaaagaatgggtgatagtaatggaatgggatggggtgagattgtgatttctacagaaaatgggacactttttcgttttttttgcctaattgctttctctatttaattttttttatatctttgcttccatattgagaaacacgaataataattcacttattttattcatataaaacttaataaattatgttcaaagctcctttttcttttgacggtcgtattcgtagaatcgaatatttcctgtcaggcattgttggtggtatagtgtttagtattgcatgggcattgggtatcggtacctttattttaggtgcgggtatgggatctgcaggtggttcggtattcggtttgttgatcggtcttgctgcattggttgcttccatgtggttctctttggcacagggggtaaaacgtttgcacgacctggacaagtcaggttggttgattctgctgatgtttgttcctattgttaacgcactattcggactttatatgttgtttgcagacggtacggtaggccctaaccaatatggtgaagatccgaaaaaccgtatgccgtatcaagcacagccttcttcggtaaatgtaacggtgaatgttgcaagagaagaagtaaaagttgaaaaaccggttgaagcagctcctgctgttgaagaagaaaaagctgaataatcttttttaagaagaaatagacggcctcttgcaaaattcgttttgtgagaggcttttttttgctatctttgaaaatcaataaaacagaaaaagaaataaatatgaaaaaagtaatttgtagtgagaaggctccgggagctatcggaccttacagtcaggcgatagaagcaaatggaatgatctttgtgtccggacagttgcctattgacgctgctaccggaaaaatggcggaaggtattgaagaacaggcacgtcagtcgttagagaatataaaacatattcttgaagaagcaggtttgacaatgggaaacattgtcaaaacaactgtattccttcaagatatgtctttctttgccgggatgaacggcgtgtatgctacatatttcgacggagcttttccggcacgttcggcggttgccgtaaaagctctgccaaaggatgcgttagtggagatcgagtgtatcgcggttcgctaacaaatcggcgacaatgaaactgctgcctcccacgaagataaggtctttagggaggcagttctttttagctgcctgtacggcatctaccacagtagggtaggccgttcctgtcaatcccgcttcttctgcctgtttcaagagctcgttttccggaagcgcccgtttcacacttgctttggtaaaataatagatagcatttttcggtagcaatttcagaacgctgcttatgtctttgtcgttgaccatgccgaatacgaaatggagttgctgcttgagagtctgttggtaaaaatcgagttgttcgcagatgtatttaattccgtcaacattgtgtccggtatcacaaataatatccggataactgtacaccttttgccaacgtcccattagtccggtgagttggcatacatcggagaaaccgttgagatagtctttgggaagaatgcgatagcctattctttctaattcttcgagggctgttagtattgtgaggcaattttcaaactggtaaataccacttaactccataaaaagtccgcaaggaaacatgccatttgtaattcggatggcatcttttcttttatcaagtattttgtccagcgcgtgcatgctgtctgccggatttaaaaacagacatagctcccggaaattttgttcgaaattttcgtctttatcttctaccgattcatacaaagtttgttggatattagtcagccgttctcttaattcttgtgattgtgaataggaaagccagtccatgcagttgtatggggcaatggattgtgcatatatgacaggagcatttactttttttccctttattgtgaacacgcgcttcacgtgaccttttgcccgtccgataactaccggaactccttctttgataatccctgctttctctttggctattttgggtaatgtatcgcccaaatattgcatatgatcgaagccgatgttggtaatgatgcataagtcgggctggatgatattggtacagtccagccgtccgcccatgccaacttcgatcactgccacgtctactttctgatcggcaaaataacggaatgccattgcggtggtcaactcgaaaaatgaaggatgcagtggctcgaagaaggaacggtgatctgcgacaaagtttactacatattcttccggtatcatttctccgttgatgcggatacgttctcggaagtccaccagatgaggggaagtaaataatccgacccgatatccggccgactgcaatactgccgcaatagtgtgggagcaggaaccttttccgttcgttccggcgatatgtatcgtcttgaattgttgatgaggatatccgaaatgttcatctaatttgtgtgttgtctctaatcccggcttatatgcttttccacctatctgctgaaacataggcatactctcatataagtactttaaagtgttctgataatccatgttttataatatttaacttcgggcaatctttattgcccgctaatttgtttatctttagaaccaccaattcaactttatatgcgggattggtgaatgagagtgcaaatatcaacatttaaatttaaagaaaccatgggaactaagaaaaattttgtgttggacacaaatgttattcttcacgactacaattgcttgaagaactttcaggaaaatgatatctatctccctcttgtcgtactcgaagaactggataagtttaagaagggaaacgagcagattaatttcaatgctcgtgagtttgtacgtgaactggatgtgttgacaagcgacgaacttttctccgaaggggtgaaactgggagaaggattgggacgtttgtttgttgtgaccagcaatgtgccggctactaaagtatgggagtctttccctatcaggaaaccggatcatctgattctcgcggcaactgaatatctgacggcgaaatatccgaaaatgaagtctattctggtgaccaaggatgtgaatttgcgtatgaaggcccgttctatcggacttctttgtgaggattatatcacagataaggtcgtgaatgtggatgtctttgaaaaatccaatgaaatatttgaaaatgtagatccggcattgatcgaccgtatctattcttctaaagagggactcgacttgagcgagtttgactttaaggatctgattcatccgaatgaatgttttgtgctgaagagtgatcgtaatagtgtattggcacgttataatccttttactcattctatctgccgggtgatgaaaggcaagaattatggaatcgagccccggaacgccgaacaaagttttgcttttgaaattctgaatgacccgaatgtgaaactggtggcactgacgggaaaggcgggaacgggcaagactttattggcattggctgccgctttgggtaaattgaccgattacaaacagatattactggcacgtccggtagtggcactttcgaataaggatatcggtttccttccgggagacgcacaggaaaaagtggctccttacatgcaaccgttgttcgacaacttgaatgtaatcaaacgtcagtttgcgacgaactccacagaggtgaaacgcattgaggatatgcaaaagagcgagcaactggtaattgaggctctggcttttatccgtggacgcagtttaagcgagatgtattgtattatcgacgaagcgcaaaacctgactccgaacgaaataaaaacgattatcactcgtgcgggagaaggtacgaaaatggtatttaccggagatatccaacagattgaccagccttatctggatagccagtctaacgggctggtatatatgattgaccgcatgaaagatcagaatatctttgcgcacgtcaacctgttgaagggcgaacgtagtgagttgagtgaactggcgagtaacttgctataaacagataatctttattaaacgataaactgtaaacgacgaacggtgaacaaattgagctgtcatgctgcaatgagttcaccgttcattatttataattcactctttatcattctttctttccgaaatattttaggaattgggtgcgttcaaatgtattaacgccctttacatctttaatattcagtctgcctttgaattgagcgatattgttgaatccttttctttccatccaggcggagaggaaacggttggcttctccgatgaatgcgttggtgttttgatagattgcactgcacacttccacagctgaagcgccggcaagaatcgcttttactactgattcgggattggctacaccaccggaagctgcataatcaatcttgtctactaccgcagatgcaatgccgatccaacgaagcgggttggcgaggtcggaagcgttgctgaatatttcaccggacatatgctccatattttcaatgttgatgtccggttggtagaaacggttgaagaggacaactgcagccgcaccgttggcatataactggtcaatcagtgccactggattagtcaggttatcgcccagtttcatgataaccggaatgttgattgtcttttttatgtggcggagaatatcgatatgacgttgttcgaacgaaccgtatgtatattgaacatcggactgtaaagccagaatattgatttctaatgcatcggcacccgctgcttcaatttgtttggcaaagtcaatccattcggaatcactgtaacagttgatactggcaatgataggaataggacattcctttttgctttctttgattaaagtcagatattcggacaatttatgttcacggatgtattctgccagatagtcacttgcttccggatagaaagccggatctttcagttggtccgcttccagcatgatctgttcttcgaacagtgatttcagaacaatggcaccggcgccgttttctgccaatttcttatttttgccgacactgttagtcagtcccgagctactgatgatgattgggtttctaagagaaagccctgcgaaagtagtttttaaatcggtcataatgaatctttttttagtagttactacttctaatttaataatttcgttctccgaaaatcttgcttcctacccgtactaaggtacttcctgcagcaatagcttcgtgataatcgtgtgacatacccatggataattcccggaaagcgtccgaatcggcgaaccaggttgtttttatctctttaaagagcctgtctagtaaacaaaattcccggttgatttgttcaacattatcggtgttgctcgccattcccattaaaccgcagatacggacatgggtcagttctttccattctccggtgttcagcatatctttgcattcgtcggggctgaaaccaaatttagtttcttcctgtgccacatggatttgcaacaggcagttgatgatgcgtcctgctttgacagcttgcttgttgacctctgccagtaacttataagtgtcaattccatgaatcatcgctacgtatggtatcatgtatttaattttattactttgcaggtgtccgataaaatgccattcgatatctttgggcaaactttcgtatttagctgtcatttcctgcactttgctttctccaaaaatacgctgtcctgcttgatatgcttcttctatcgcttcattggggtggaattttgagacagcaaccagccggactccttgcgggagttcggccagtacttgctttaaattttcagcaatactcattgttgcttatgcttttgacggatcaaactccggtttgtcattcggtccggcgctgtaaggatatacatccatgagcggagtttcggataccatgccgatctgatagtctgccatggttcctttcatgccttcgtccagtttcttaactgcatcgcgcaggtcggcagcctgtaccaatacctgtgtggaagtctttttctctgcaccgcttttttcgtccagcgtgatgaaaataagtttgcatttgaaccaacggtcggcactttcttcgtcgctggggaaaagttcgctataattggcacgtttaatgtcggaaactgtaaattctccggatatgaatggagtcatttcttcaataattcgtgcttctgcttctgtaaagctgagtgcatcaacaagatatggttcggtaacttttttctgcattccgttttccattactttttcataacgaatcttgcactcaaaccaagtatgcattgccataattttcttcctttttaattaattaattcatgtaaattgcctacaaagataaacaaaataccaaagtaagtgccgaaagaattttattttcttttatgcaaattcttaagttcaaaggaaagcatgacacggaatagtccgataatgaggaaagtgaaagaaatcatatagaccgcgtagagtgcacctatggccggttgccacaatatcaataaggaacatataatggcaaggataccgaaagccatgtaccagccccagtcgcgagtaccataacgtttcaggtcgatcgagtaaccggtggaggagaagccgcggaacatgagccaaaaggctatgataaacggaatgacttccatgctgaccatgggataggcaatcaggtagatgccgagaataacgtcgatgattcctcccacgatataccagccccagcttggcacaccttttcgattgctgactgcaaagaggatttccaagataccgcttatcaacatggatatgctgaatacgatacttagagctacatagctgcttaaaggtgcaaacatcagccaaagggctacaataatatacacgattcccaagagaagagaagcccaccaattttttactgagtgttgaatctcattgaatactgtttccatacgtttttatatttaaaattgaatactagagtaatttcgttgtggaataacaatttgaatttagaaaaggttttccgtgaacatatttcgaggaatagttgttttctatataaagtaaattttaaaaaaaatatgcattatggcaacaacaaatttcaaaggacaaccggtgaaactgatcggtgaatttatacaagtgggtaaagtagctcccgattttgagctggtaaaaacagatttatcttctttctctctgaaagacttgaatggtaaaaatgtgattttgaatattttcccaagtttggacacaagtgtatgcgcaacgtcggtacgcaaatttaataagatggctgccggattgaaagatacggttgtattggctatttctaaagaccttccttttgctcacggtcgtttctgcacgacggaaggtattgagaatgtaattccattgtcagacttccgtttttcggattttgatgaaagctacggtgtgcgtatggcggatgggccattggccggacttttggcacgtgcagtggtggtgattggcaaaaatggaaaggtagcttatactgaacttgttccggaaatcacgcaagaacctgattatgataaggcgctggctgctgtgaaatgattttttaatttggaattataagattttgacctaatgagaactggtagacagatctggcaggacaccagacctccattcttgttaggttgtgtttttttatacactaaaccttattgacatgaacaaaataggaattttattctttgccctgtcaactatgggcattggaaccctttcggctcaaactgccgatagtactcaaacttctccctggactaaagaaggatttgccggactgaaactgacacaggttagtctgaccaactgggctgccggaggtgataactctgtggcctttgacttgcaaggtacatatcagattaattacaagaaagaaaaacatttatggaccaatcgtctggaattggcatacggacttaataagactggggaagatggtacgagaaaagcaaatgataagatttatctgaatacgaattacggttattccattgccaaaaattggtatgccagtgcatttgcgacattccaaactcaattctctccggggtatgactattcggtcaacaaagatgtttcaatctccgaatttatggctcccggttatttgactaccggtttgggatttacttatgatccgggcaagatatttacagttgtactatctcctgcttcttggcgtggcaccttcgtactaaacgaccgtctctctgatgagggggcttatggagtagatcccggtaaacatctgctatcagcttttggagcaaacctgaagggggaggtcaaatatgaatttctaaagaatatgaccgtatattctcgtcttgacttatattccgactatctgcataaacctctgaatatagatgtgaattgggaagtacaagtaaatatgattatcaataaatggttctcaaccactctgactaccaatctgatgtatgatgatgatgtgaaaatagctcagaaagacggtacaaaaggatcacgtgtacaattcaaagagatattgggcgtgggagtgcagtttaatttctaattcaagtataaatataaagcgtaactacctgactggtagttgcgctttatattttatatctactacttatttcttcttttttttcagtcctttgtaagcgatgaatccgacaaccagtatgacaacagctataatgacataaccgatttcgtgactatatttggttgccattacataaacgtcattggttgttttgaggtctgtaaaccgataaatcagatatccgagcacggccaataccgtattccatattccggcgcctagcgttgtataaagtaggaaagggcctaacttcatgccggccaatccggcaggaatactgataagctgacgtacagcagggatgagacgtccgaagaaagtggaggccgcaccgtgttttctgaaatattcttcggcatggtgcactttttcttcatcgataagacacatatgccccaaacggctgttagcaaatttgtaaacaatgggacgccctaaccaacgggccaggtaataattgactaatgcaccgatgtctgctcccacagttgcgaatacaatgactagaaagatgttcatactgtcgtctgccatggctttccatgcggcaggtggcactacggcctcagagggaaagggaataaaagagctctcgatagccataaagattgtgactacccaatagttcaagttttctaatacccatttgagaagttctgctactgattccattttttaagggatgaatgatttaatttgatttattgttttctttttcttctttaagacgtttcataatttcttttaagatcggttcatcctcttttctatggtccggaccgttcaacaactgctgaatggtttcttctctgaatggacgttcgcaatctttattgtatttgaggaaaccgtccaggtcatcggtcatgatactgataacactcaatctttccggcaggtcttcatatttcggattgattttgtaggctttctcataattttctttggcctcgtacatataattgtgttccgaataagcagtaccgatcatgtaccacatttccggaccggtactggtttttgcagcttttttaaatgcttgggttgcttttttctctatatcttcctctaggtatactttcccttccgtcaggaagataaggccttcgtccggattgatttcttttgctttcttgcatagctggtgagcttccttatatcttcccattttggcaacggcatttgctttagtggtataagtatctatcagtagaatcgaaccgctgtctccgttttcctcaaaaatccggataacctggttacaacattcttctgttttttcccaatcttctttggtagcataggacatccccatgaacatataccccaattcgggggggatggctttgtattcaatggctttttcgtaattctcgatagcgctgtcggggttgttgaggtagaagaaactgtgtgctttgtaagcgtaagcttctccgtatttatcatcggcagccagtgcgaaatcacaggtttcgatagttttgtttatatcctcgctcataaaatagcattttgccagtcccatccagtaagaagggttataaggagcgatgtcaatcaacttgtcaaagcactcgatagcttctttcatgtgttgcgttgctcccagatagtcggcctgaagtacgataaagtcttcttcttcgccatattggtcttgtcctttttctatccattctttcgcggcttccggatatcccatatccatataaagataaacgatctcgatgattgaggccagatcgtcggtgtcctcgattgtatttatcagttgttgtgcttcttccagtttaccttcattcagtaacagttctgctttcagcatttttacctcggagtcatacgtttctgtgatactgtttgccacttctttggctttacttagtttttgagtatccagataaagaaaggcttgttctatcagtaagccagtgttgccggggtgcagttgaagtccgtaattaatgacttcctgtgcatcgttgaatttgcgttcggtggcataccaatcggcaatatcagcgagctggtcgccatccaggtatagttgtcgtttttctgctttggcggcttcgtatctttggatgatttcagtcagttctttttttgcacttggtgaattttttctccccattttatttttttctttttaattgctgacatggggctgctacaaaagttcttgttcatttccttttgacacagccccatgttataaagtaaagcctgacggcttagttatttattgatcttaccccacgtgtcttttaagcccactgtacggttgaatatcagtttttccggagttgaatctttgtcaatgttgaagtaaccgattcgttggaactgcaaataggagagtggaggcagggttgctgcaaacttctctatgtagcagttcggaagaactttcagtgaatcggggttgataatatctttcattgcttccaatgcatcacagtttttggcctcgcggatagcagccagttcgtcgcgcgggttttctactttccacagacggtcgtacagacgtacttccgcttgcatacagtggttgcagcttacccagtgaagtgttcctttcaccttacggttggcatccggcataccgctacgggtatttgcatcgtattcacaataaacttcggtgatgataccgttctcgtcttttttacatcctgtacattttacgatataggcatttttgagacgcacttcctgtcccggtgtcatacggaaatatttcttgggagcatcttccataaagtcttcacgttccatccacagttcacggctaaattcgatcaggtgacttcctgcttccggatcttccggattgttgatagcttccagttcctcgacctgtccttccgggtagttggtaatgataagtttcaccggattgataacggcggacacacggatagcacggctgttcaggtcgtctcttacagaactttcgagcaaagcgatgtcattcagcgcgtcgtaagtggtatatccgattttatcaataaatttgtggatagattcgggagaataaccgcgacggcggaaaccgcagattgtcggcatacgaggatcatcccagccgtttaccaggccttctttcaccagtgtcagcaagttacgcttactcatcagtgtatagctaagattcaatttattgaattccgtttgacggggacgatggtcgttcaggtctttcccttctttcaaccagtcgataaagagatcgtaaagcgggcggtgcacaacgaactcgagcgtacacagggaatgggtaactccttcgaagaagtcactttgtccgtgggcgaagtcgtacatcggataggctttccatgtggtgcctgtgcggtggtgcgggtgttttaccacacgatagatgatcggatcgcggaagtgcatattgggattagccatgtcaatctttgcacggagcaccatagcgccttcttcgatctcaccgctattcatctttttgaaaagttcgaggctttcttcgataggacgattccggtacggactttccacacccggttgggtaggagttcctttttgctgtgcaatctgttcggaagtctgctcatcgatatatgcttttccttcttgtataaggcggatagcgaagtcccataattgctggaagtagtcggaagcataatactcatttccccattggtaacctaaccattggatatcttccttgatagcttctacgtattccacatcttccttggtagggtttgtgtcgtcgaaacgaaggttacatacacctccatgtgcttctgcaatgccaaaatcaaggcaaatagctttggcatgaccgatgtgaaggtatccgttaggctcgggcgggaagcgcgtctgcacttttcctccatttttaccttctttcaaatctttctctactgcttgctcaataaagttcaagcttttcttttcacctgcttcttcgttttttatatctgtcataacggtaagtgtgttagctctatttaagagctgcaaaagtaacaataaaaagtggaaatgagaaaaacggagccatagaattaaaaaaaatccagaataatggagtaggtttttttatccattccgtctttattataaaacgaactctaatttatgcagaaaaaagacactatacaagataaagataatgaacgtgatccgttgatttcctatttccggactttggagaaagaagtacccgaagcggatatagaaaaacgctggaatgctttaatgcaaaatgtaaatcgcgagcctgtttccaaacgacacaggtatttgcgaatatatatgttagcggcaggggtggctgctttatttgcaggtatcgcctggggaacaaaaatatatatggatcatcattcacattccatagatactgctattgcattattggaacaatgtacgactgatacggtgcaacaggtgcttcttatcactcatgcacagcaacggatagaagtggataaaggcgcccgtatcagttattcgcaggaaggagaggcttcggtcaatgagcagcaagtggaaagtaaaccgcaaaagacggagtataaccaattgattgttcctaaagggaaaacatcgcggttggtactggctgacgggacttcgctgtatgtaaacgctggtactaaggtcgtatatcctagtgtgtttgagggtaaatcccgtgaaatctatgtagacggcgagattttcattgatgtcaagaaggatactgaaaaaccatttattgtgaaaacttccggttttgatatccgtgtgacgggaactgctttcaatgtcgatgcttacaaagcaatgcgtgaggcagaagtggttttggtgcgtggctctatcatagtgaaagatcatgcaaataaggagaccgccgtaaaaccgaacgagttgttgaaattatccgaaggggtggctaatgtcaaacgttctgttaatgcggaagaatatacggcatggacgaaaggacactttcctttggaagggcgtgatatgagtactatattgcaacgactttccctctattatggttgtgaaattacttgtgatccgtctatcgaaaatttccctttacaaggaacgattgatttaagtgtgccactgcaaaaggttcttgaaagaatttcaaaaatacaccctatcggtatccgtgcaactgctaatggatattatttgtttattaaccgaaatactaatctttaaaaacacacgatgcctatgaaaaagaaaaagtaacacttcactcaacttctggtagaagatatagtcaaagactgctctacctttaatcttttaatttattttattaatccctcgtggtatttttcattcaaataaaaaagcccggataacctcacattatccgagcctggatgaatgacattttatgccatgagcatctaaactattatgcaaaaatatggattattttagaagaaaacaaatttcggcaatgttattgttctttgcattgcttcttccgatttccatggttgccatggaacaaaacaatggagtattttcattcaaattacaggatgttactgtgaaagatatattcaagtatatcgagaaaaacagtgaatatatctttttatattctacggataaaaacttattgaaaaaaatcaatgtggatgtcaataagaaagatattactcaagttttggatgaaatattaaagaacacaacactaatctatgatatagacgggaagcagataattatacgagagaaaaacgcttccgaaaaatcgcagcaaaagacaacgcaaaagaaaaaaacaattcgtggaatcgtttccgatgatagcacacaggaacctattatcggagctactataagggtgaacggaagtatgacaggaactacctcgaatatagaaggtgactttgttttggaatgtgctgtgggagataccttgactgtttcctttgttggttatcaggatcggtcggttttggtaaagagtggtaatatttatgctattgctttaaaagagtctgcagcagaactgggagaggtagtcgttactgcatttggtgtagggcagaagaaagaatcgcttgtgggatctattcagcagatcaagccgcaggaacttaaagtaccttcttcgagtttgagtactgcttttgcaggacgtatggccggtgtgatagcggtgcaacgcagtggtgaaccgggagctgatggcgctaacttttggatccgtggtaaatcgaccttcaatggtaacacttctgctttgattatcatggatggggttgaaattagttcaacggaattgaatgcgttggatcctgaggttattgaaagtttttctattctgaaagatgctactgctacggcgttgtatggtacacgtggtgccaatggagtgatgattgttgcgactaaaaacggtaagaatctggataagcctattattaattttcggttggaaggagctatatctacaatgacgcgtgtgcccaatatggttgacggtcccacgtatatgaaaatgtttaatgaagcggtatcgcgtccgggatgcgatgtaagcccttattcacaggaaaaaattgacggtactattgcaggattgaatccttccttaattccgcaacactattacaaatataactttttaagtacctgagcaacaaaaagttgctcaggaatttgccatgtcagatttttcacctatcttagtgttgcaaatcaaaatatgtatcaaacccgacagacatggcaaaggtagcaattaaatccgagaaactcactccttttggaggaatattttcaataatggagcaatttgactccagactctcatctgtaatcgactcaaccctcggtatgagatgcaggctgtatggttatcaatacagcgaaatcatccgttcgcttatgagcgtttatttttgtggcggctcatgcatcgaggatgtcaccactcatctgatgtaccacctttcgcttcatccgacacttcgcacatgcagtgccgacacgattcttagagccataaaggaactgacccaggataacatttcctacacatccgacactggcaagacctacgacttcaacacggcagacaagctgaatacactgctcctcaattgcctattgtccacagggcagctgaaagagggcgaggggtatgacgttgacttcgaccaccagttcatagaggctgagaagtttgatgcgaagcctacatacaagaagttccttggttatcgccctggcgtggcggttattggcaacttgattgtcggcattgagaacagcgacggcaacacaaatgtccgtttccaccagaaggacacgctgaagaggttctttgaaaggtttgaacaaaacaagcttattatcaaccgtttcagagctgattgcggctcgtgttctgaagagatagtggaagagattgctaaacactgcaagaccttctatatccgtgctaaccgatgcagttcgctctacaatgacatctttgccctcagaggttggaagaaagtggaattgggcggcattgagtttgagctggcctccattctcatcgagaaatggaaagggaaggcataccgtcttgtgattcaaagacagaagcggatagacggcgaactcgacctgtgggaaggagaatacacctaccgctgcatccttacaaatgactacgagtcttccgagaaagagattgtcgaattctataacctccgtggagggaaggaacgcatcttcgatgatatgaataacggattcggctggaacaggcttccaaaatcctttatgggagaaaacacggtgtttcttctgcttatggcactcatacgcaacttctataaattcatcatggcgaggcttgacgtgaagaggttcggactcaaagcaacaagccgcatcaagacgtttgtctttaagttcatctctgtgccagccaaatgggtcaggacatcaaggaagtatgtgctgaatatctattcatgcaacaatgcttatgccaatgtgttccagaatgactttggataacaccgacaacttatagtcgtgattttgcgtattgcctcaagtcgcatggtggggtaaggggcatttatatgtctttatggtgacattcgatgcactgtgccccctttttactaacgatgcagattcttttcgcttctgtatcatattaggcgcgtagttgcggatttgaggtccttatatttatcctaatgtagattggtttgatgaaatatttaataagagtgctttttctgaacgtgccaattttaatatacgtggaggtagttcgaaaatggattactttatgagtgccagtttcaagcatagtaacggacatttaaagtcattaagcaaggactatttttcatataataataatgtgcgtaattataattacgactttataaacaatttgaatattagtgcgaccagaactactaaaatatctttagggttgaatctttctgttgccgataagaaatctcctttaatggatgtgaatgatattttccaactttctatggaagcaaatccggtagattttccagtacgttttcctgcaaatatgtcagaccgtgattttgttttatggggagacaaacctggtggcattcatggacaaggatggtatagaaatccggtggcggaatacgtgacaggatacaaaacaaatttgcgtactactattactgctaatttcaaattggcacaagaattagatatgattactaagggtttgaaatttacaggattattttcatttaaaaattatagtagttcatctacagaacgtagtgctagctataaccattactatatgtcttcttatgatccttcatccatggaatataaaataacccgtattggtgacgaacaaagtaccgcattgacaaatgacggtagtcggaacggggataggaaaatgtattttcaggctatcttggactataatcgtatttttaaagaagtacacgatttgaatattatgttcctttataatcaggaacaatatgatattaatggtcctactacacttttttcatctttgccgcaacggaagcaaggagtagctggacgtgtatcttattcttatgatggccgttattatattgagggaaattttggttataacggttcggagaatttcgctaaaggacatcgatttggctttttcccttcaatagctgttggttataacatctcaaatgaaaaattctggcagccaataaaaccggtcatttcaaatctgaaaatcagaggttcgtggggattggttggcaatgatgctacgaatgcagggcgctttgcttatatggaagatcttgtattgggtggtagcgattcctatacgacgggtattaggcaagatacgtattattccggtccgtcatggaatagatattttaaccctgatttaacttgggaagttggtgaaaaaattaatttggggcttgatttacagttattcaatgactttaatctgacatttgatatatttagagaaaagcgccgtgatatttttatgacccgtgaaaattccattccggaaattgttggtacaggtgaaactaaaattacttccaacaatggagaaatggagaacaaaggattagatttagctatagactacaataaacaaatcacgaaagattttttcctttctttcaaaagtacattgacttttgctcgtaacaaggtcttgaaaatggatgagcctccgtattttgaatatccgggattgtccgacgtagggcatccattgggtacttactggggatatgtagctgatggacttttccccgaccaagaaactattgacaattctccgcgccaagatttaggttatacaccacagccgggtgatattaaatatgtaaatcagcctaatgcaaaaggagaatatgataatgtaattaatagtaatgatcgtgtggctattggtcatccttatgatccggagcttgtatatggtttcggcccttctatgaagtggaaaaactgggacttttctttctttttccaaggagtggctcgtacctctttcatgatgtatggtatgcatccctttggtacaacgagtattaaaaatatgttacaatttgtggctgatgatcattggagtgttgataatcctaatccaaatgcagcgtatccacgcttgactaaagatagtaatggtaataacgatcagtattctacttattggttaaggaatgcagctttcttgaaattaaaaaatgcggagataggttatacttataaaggtatgcgcttttatttaagtggggtcaacttactgacattttctcctttcaagcattgggatcctgaaatgggaggtggtaatggtctttattatcctacccagagagtgttcaatattggttttcaaatgaccatacagtaatcaaacgatacaaaattataaaactatgaaacttaaatatttgttctgtggactttttttgctaggcttgtcagcttgtaactatttggatattgtaccagatgaagttgtgaaagaagaagattcttacgaaactccggatttggtacggaattacctttattcatgttattcttttcttcctaccaacagagcgattagtaataatgcttattggatgatgtgtggggcggaaacttctttttatcgtaaagaaatgttttctacttttaatgaaggtacatacgggccttccagtctgcacatgacttctgatacatggtctcctatctgggaaggtatccggcagtgctatatgtttctggatatcctggataaggcaaaaaatctggttcctacagataagcaacattatcgtggcgaagctaattttttgatagcttattatcattttctgtccttgcgttcttacggtcctacatgtattattgataaactttatgacccaaagttggatgttgaagaatttcctgaacgtagtagttatgatgaggtggtagagttcataaatcgcaagcttgatgaagcttttcctgatttggctaccacatattccggaaaagattttgggcgagctacacaagtagctgtctatgcattgaaatcccggctttatttatatgcggcttcaccgttatttaatggtaacagtgagatgtatgccgattttaaaagtaagaaagacggacgccatttgattgcacaggaatactcggaagacaaatggagaaaaagtgcggaaatctctttgcaggctattacagaactggaaaaactgaatttccggctttatgatgataatgatgcaggtactcctgacgataatcgtccgggattatctaatccggcacaacgtagaatacgttattctgtgattgatttttcaaatccaagtccggaagtcatttgggctgatacccgaaaagaaggatactatgatattcagaatcggtctattcctcgccaatatattgacattgtgtatgatggttcaggcggtatagcgcctacattgcaaatggtggaatcgttttatacaaagaatggattgccaatggataaagataagacgtatgattatgacgggaggtttaatattgttgagctaccggtgaattatgacggaaacaattactcgaatgttagtaatggtacttctataaaaatgcatcttgacagagagccgcgtttttatgcaaacataggttttcatcatggtttctatgaaatcacgcagtatgacggcgagataacgagtgatgatcctgccaagcgggtcattgtggaggaattacgcaataatgaccgtcatggtaagcgaaatcaagacctttattattctgttaccggatatcataataaaaaactggtgcatccttcgtatgaagatggcgtggtgcactatccgctacctcttttccgtatggctgaaatgtatttgaattatgcagaagctttggtggagattggagaattggataaagctaaagattatatcgataaagtgcgtgtacgtgcgggcattcccaaagtagacgaggcctgggataatttttctactaaccccggttaccaagacacaaaagaaggattgagggagattgtcagacaggaacgttctcttgaattttatcttgaaggtcagaagttctttgatattcgtcggtggaagattgcagagaaatatttggggatacccgatttaggtttgaatgtggctgccaatgatgatgcaggattcttccaggtaagagagattcctttgatccgtaatttccataaaggacagtacttaatgcctattccgatgaaggaaactaataaaatgccacaattagtgcagaatccatattataattgattctttctctcttaacttttttatttagtggccgggtcgaccgcagttattctttggtcttcccggccctactttttataataagtattatgaagacattgttatatactattttttttagtttgtttggaatacatttattggcacaatccaacaaggctgtctgtttggacggtaaagacaataatctgcgtataggtatggataccttatgccgccattggacattggaagcatggattaaacctgataataatgaatggaagtcgcaggaagtgattattggcggtggagaatacagtgaactcaattcgttggactatctgccgttggtgatagatcatggacgattgtgcaatgtagctacaggattggttggggaagaaattcctaaaggaaagtggacgcatgtagcagcagtctgtaatggacgttgtaccttgttatatattaatggccgggaagtcgctcgtaaagatactgccactgtcattttacccggagcaatcggaatcaatgaatcatcagagagcgcttttggtggttgcattgatgaagtgcgcatttggaaaacaggattgacggaaaaggaattgaatgaatggatgtatcgtccggtcacagcacggcacagtcagtttgattgtttgaaaggttattataattttgatgatttatcggaggatatctctatcaatagagctgcggagggatggttgtcatttcatttgcgtaacggccgtctggagcaatataagtctgcccctttagcttatgcggttgaaaatgataaccctttatttcgtgcggaatatggagaacaagaattgttcaaggtagtggctttgcctgccgaatgggatgttgaccggggaaaacgagactttcaactgttaaaactacgtatagagactcaaggtgaacagtcgcctaaagcggtaaaagaactggtgcttgattttggaaattgtacttcgttgaaagatatcgaacggatccatatttataataccgggtcgaaacctcgttcgaatgtacggattgaattggtaaaaggcggattggtcccgaaatccggaaagatgaagatacgtctttcggaaaacgaatccacgcggttgaaacatggtaccaactatctattagttacggtcgatgtcaatgctgaggctgtattgggtaattgcttgggagtaaacgttcagtctgtaaaaataggccgtcgttctattactcccatattatccgatgattgtctcccagtaatgattacatctgatagccggaataataagaaatatctgaaagtactccaatggaatatctggcacggaggtaaacatttgggcaaagatgggcgcgaacgtattatcgatctgattaagcagtccggtgctgatgttgttactatgcaagaaggatacggttcgcaagaaatgatagcaaaagctatcggatttaatttgcagactccttctccaggggataatttgtgtttgtttagccgttatcctatacagaaaattaagacgaagaatactttttattcaaatcctgctataatcacgctcccttccgggaaaaaggtgtatgtgaatgcttgctggttgcgttatgcctaccggccggaatatacttgttattatgctaattatggaatggatactcataggtgggctgcggaggatagtatattggctttggtcgatatgaaacgtctgttggagaatgacttgattccttatgtggattcttctatgccggtcattatcggtggggactttaattcgtgcagccatttggattggacgcataaggcggctcctattcatttcggatatatagctgaggaactgcccgtgtcacgttatatgcttgataaaggttttagggatactttcagagagataaacccggatgaattggagcggggagaaggaacgtatgcggtcattttcggacagtcgcagacttctcgtgttgattttatttatagtaaaggtaatggaataaaaactgttgcttcgaagattgtacgtacaatgcctgagatagatgacgtatggcctggagaccatgctgctgtattaacagtgttcgaacttgaatagaaaggaggaaattgtgaaaatatataatatcataagattagttggattcattggagtttggttgtttctattgcaatcttgtaaagatgaggaacaattaaattcaaaatttgaaattgagggaactgctttgcaacagagcttggatgggaatgcttctaccgttgtcgttcaggtaaagactacgcttcctatgtcggattggcaggtggaaagtgatgcggactggcttaaagtttataaagaggctgatccggaaaaaggacaggttatagtgatgaaggcagagtctaataatactcgtgataatagaactgctacgatatccgtaacatctgctattcatgattatacgattacggtgttacagttttctaccttcgaggtgcctgaagatatccaggtaaaggttattggaggcaaagattcggaacatcaaaatggtcgtggaattgaatgttcttttgacggaaagtttactcctgaagctgatggctatcattctttatttggaaaatcagcaaattttccagtgtcgctcgaatattattttgaaccggatacagagattgattatgtgatttatcatacccgtgccggcaatggtaattttggtcgggtggaagtttatacggccactgatatcggacatactgattgggtgaaatatggggaatacgattttcgtggacaagatatggcgtcacgggttttgtttgacgagacaaagcgtgttagcggcattaaatttatggtatattcaggatataataactttgtgagttgtgatgaaatggagtttttccgatataataaagaaagctcggtgaatgaccaattacttaaagtcttcacagatctttcatgtactgccttgaacgaaggtgtcacagaagatgttatcaatgaattgccgggatactttgcccgtttggctttagctctgtataatgatacatacgatacacatgagaaagagttccgaatcagaaagtatgccccgtacagtgatgttgtcgaatgggcagacaaattgatgactaaaaaatatggcaatcttgataatcctaccggtatatcggtggagaaagatgaagaaatcatcgtattggtcggagatacatacggacagcaactctctttgcaagtgataggagagacttatacgaatgatgaagaagatagaggttggatagtcaactcaagtggttctatttattttctatctccgggtataaacaaattgacgatgaaagaatccgggcaattatttgtgatgtatacagctatgctcaatgatgacagggctaaacctgtaaacattcatattccttcaggtagtggaaaagtgaccggcttttttgatttgaaagatcataagacggatcagaaatatgcacagttgttggctgcggcaaaccataagtatttttgtgttcgtggtaataagatcatgttttatttccatactgaaaaattacggagttttgttcccgatagaatactttccgccattaacttgtgggatgatattgttggctgggaacaggaattaatggggattgaagatgtatggccttcacaaatgaataatcatatttttgctatttcaccggaatatgggtatatgtgggcgtcggattatcgtgtggcttttgtttatacttatcttgataatatcttattgagggataatgtaatggcagataaagataatgcctggggacctgcacatgagatcggacacattcatcagaaagcgataaactggcctggttgtactgaatcttccaataatttattttctaattatgtgctttataaattaggcaaatattgttctcgtggtagtgaactttttcatttggctgatgcgcgttttgtagaaggacaggcttggttcgacatgggaaacccacatcacatgaatgaagataccgaaatccatatgcgtatgtattggcaactgtggaattattatcatcggtgtggttataatgaaaaattttggcaaacgcttttccaattattacgggcagatcgtattgatgagaataacccgggagctgctcaattgaagttagcggtaaaggcttcacaggctgctcatgaggatttgagtgacttttttgaattgtggggattctttataccgggaaagggtgtcatcgaacaatatggaacttatgattatcttgtaacagaggaaatgattcggaaagcaaaggcggagatgtctatctatcccaaaccgaaacacgcgtttcaatatattgaagaccgtaaagccggagatattggtttggatagtgagccttcggatgtcgggtattatacacagtttaaaggtagtgtaaaaccggtcagcagtgaagtatattgcacggttaacggtcgtagatattcagtgaagaatggagagaatgctgtggctttcgagttacgtcgtggggcagcggacggtgacctgctttatttttttaatatgtatgggtatgatatacctggtggaattgatctggctgatgctaagctttatgcagtccaggccgatgggaggcgtgtagaaatacctgttcgttaatatactcgtcagatattaatgttttagaaaaaccttcattttcggatatttacaaaataaatccgtcgatgaaggtttctctatttttcggatatctgcccgaactgtatgcgtagcttgcggatagatttggcaagggagttcatagatgattgcggattgatatccaacacttcgctaatctctttatgagttaatccctttatgtaaaataaataaagaatttgtttctgttgattgggcaaagaattgattgtctgcaataaggtttgatatttttgcagttcctcatcatttttagaaaagaatgtcttgaatacttcatcatcatcaggaattaagaattccatatcatcgatgctgactatatctttttgggctgcgtaataatcgtagattatattacgcatagcacggagtaggtatatctttatattagaaatgttatcgatattttcacgtttacaaagtttagtgaatatttcttggataaagtcctgaaccaactcagaatcgttggttagttttaatccatagttatacaacaaattatagtacttcttataagaaagttctagtatgtatagtagtttatctttttttccatgaaaaacctttgctgcaaggtctttttcctcaaattccatatttaaagctctggtgataattatatttgtcggctatattatgaaaaaaaaaggaataaaacctcaaaaatagaaaaaaagtttagactatctgccaattgttttctaattcaggtttttaacacatcttctgatagatacggatgtgattacttaaccggaatatagccgctcttttttataatctcctgtccttcgggtgaaagaataaactgaatcaagggggtgactgcctctttgttttttacattgtaatagtaataaagagggcgcacgatcggatatgttttgttggtggcattttctaccgaaggcgtagcataatggcttccgtcataggatacggagagagtcttgatacgcggagatacataggccagaccgacatatccgatggctccttttgtctggctgacagactggataatggcaccggtggcaggcatggaaaggctgctcgacatataatttttgtttttcaatacgctttccttgaaaaattcgtaagttccggaagatgtttcacgggagtacactactattttgcggtcgtctccgcccacttgtttccagttggtgatctttccacggaaaatgtcttccaattgctggcgggtaagttgtttcacaggattggaaggatgtaccactacggcaagagcatcataggctacaatgatttcgtctacatcctgtccggcttccttgattttcatcttttcgctgaacttgatcggacgggaggccatggcgatgtccgttgtgttatccattaaagcggagatacctacaccggttcctccgccggtcactgtgacacgggcgtcagggtgctgattcatataccgttctgctgtctgctgggcgacaggcaatacagtgtcgctgcctttaatgcgttgtgcattgacactaagagagagtagggaaaaggcgattaataagtttcttctcactttcataaattattctttttattgctggtgcaaataaaacaattggatattacattcttgtttcatgtagggtggaaatagatgttgtaatacaaatgtaatatgattgaaacatttccttcaaacgttagtcacatccccttaataaggagatgctttctttgcatcagaattcaaataggtatgaaaaagttttttgaaaagattatagaaggtgtcctgacttgtagcggtttcgtaacgagtattacaattctgcttatcgttcttttcctgtttactgaagctttcgggctattcaaaagtaaagtgattgaagaaggatatgtgttggcgctgaataagagtaataaggtaagcgtgctgactccggcgcagataaagaatgttttcgatgaggagataacgaactggaaagaactcggcgggaaagacctgcctatccgggttttccgtctggaggatataacacagtattataccgaagaagaactcggccccgcttatgaatatgcaggtgagaagataacggaactagtggaaaagatgccgggtattgtggcatttgttccgcagaagtttatcgttcatcctgacgcggtgcatcttatagaggataacacgatctcggtaaaggatgtttttgcaggtgccgaatggtttccgacggcaactccggcagcacagttcggatttctgcctttgattgccggtacgttgtgggtaagcttgtttgctattctttttgcattaccgttcggactttcggtttctatttatatgtccgaagtggcaaatccgaaggtacggagctggctgaaacctattattgaattattgagtggtattccttccgttgtatacggctttttcggattgatcgttattgttccgttgattcagaaactgtttgatcttccggtgggcgagagtggattggcaggaagtatcgtgctggctattatggcattgcctaccataattacggtgacggaggatgcgatgagaaactgtccgcgtgctatgcgggaggcgagtctggcattaggagcttcgcaatggcagactatatataaggtagtgattccttattctatttcggggattacttccggagtagtgcttggcatcggacgggctatcggtgaaacaatggcggtgttaatggtgacgggtaatgccgccgtaattccgactactattctcgaaccgttgcgtaccattccggctaccattgcggcggaattgggagaagctcctgccggtggtccgcattatcaggccttgtttatgttgggcgtcgtgctgttcttcatcacactaattattaactttagcgtggaatacatttcttctaaaggattaaaacgtagtaaataaaatggaaatttgtagtaataataaggctaaacatcgttcgcagaagctggctttcggaattttccgcttgttgagtctttgtattgtgctgatactctttgcaattctcgggtttattatatataaaggcagtggtgctatcagttgggagtttatcacttcagcacctacggacggtatgaggggtggaggtatctggccggctatcgtaggtactttttatctaatggtgggtagtgcgttgtttgctttcccggtaggtgtgatgagtggcatctacatgaatgagtatgcgccgaaaggaaaattggtacgctttatccgggtaatgacgaataacctgagtggtattccctctattgtgttcggtttgtttggtatggcattgtttgtcaattatatgggctttggtgacagtatcctagcgggttctttgacgttaggcttactttgtgtacctttggtgatacgtactacggaagaagcgttgaaggctattccggatagtatgcgtgaaggtagtcgggcattgggagcaacaaagttgcaaacgatctggcatgtaattctgcctatgggaatgccgaacattatcaccgggctgattctggctttagggcgtgtttcgggtgaaacggctcctattctgtttacttgcgccgcttacttcctgccgcagttgccgaccggtattcttgaccagtgtatggcgttgccttatcacttgtatgtgatttcgaccagtggaacggatatggaggcgcagttgccgttagcttatggcactgcattggtcctgattgtgattatcctactggtgaatctgctggctaatgctttgaggaaatattttgaaaaaagagtaaagacgaattaaataatatatggatacagtaaaaatagatgcgcgtgatgtgaatttctggtatggtgatttccatgctttgaaaggaatcagtatgcagattgaggaaaaatcggttgttgcgtttatcgggccttccggttgtggaaagtctacctttctccggcttttcaaccggatgaatgatttgattcccgctacccgcttggagggggagattcgtattgacggacagaatatatatgcgaaaggagtggaagtggacgaacttcgtaagaatgtgggaatggtgttccagcgtcctaatccttttccgaaaagtatcttcgagaatgtggcttatggacttcgtgtgaatggagtgaaggataatgcattcattcgtcaacgggtggaagaaacgctgaaaggggctgcgctttgggatgaagtgaaagataaactgaaagaatcggcctatgctttgtccggcgggcagcagcagcgtctttgtatcgctcgtgcaatggcggtatctccttcagtgttgttgatggatgagcctgcttctgcactcgaccctatttctacggctaaagtggaagaattgattcacgaattaaagaaggactatacgattgtgattgtaacgcataatatgcagcaggcagctcgtgtaagtgataagaccgcgttcttttatatgggtgaaatggtggaatttgacaatacgaagaagattttcacgaatccggagaaagaggctacgcagaattatattacaggacgtttcggatagtttgtaccggaatggcggggataaataggaatattaacacttatatataatagactatggtaaagtttatagaatcggaactcattctattgaagaaggaaattgacgagatgtggacgttggtgtataatcagcttgaccgtgccggggaggctgttttgacactcgacaaggagttggcgcaacaggtaatggtccgtgaacgccgggtgaatgccttcgaactaaaaatagacagtgatgtggaagatattatcgcactatacaatccggtagcaatcgaccttcgttttgtattggctatgctgaagattaatacgaatctggaacgcttgggagactttgcggaagggattgcccgtttcgtgatacgttgcaaagaaccggtgcttgacgctgagttaatgacgcgtctgcgtttgggtgagatgcatgctgaggtactttcaatgttggaactggcaaaacgtgccttgcatgaggagagtattgaaatggcaactaccgtattcggcaaagataatctgctggacgaaatcaacgcgcaggcaacgggaatccttgccgattatatcattgaacatcctgaaacagtacatacgtgtgtggatttggtgagcgttttccgtaaattggaacgttccggcgaccacattaataatatcgccgaagagattgttttcttcattgacgccaaggtattaaagcatagcggaaagatagacgagaactatccgaatagataattttttgcaggtttttaaacagaaattagggctccttaaaattttatccctcaaatccgcaactacgcgcctaatatgatacagaagcgaaaagaatctgcatcgttagtaaaaagggggcacagtgcatcgaatgtcaccataaagacatataaatgccccttaccccaccatgcgacttgaggcaatacgcaaaatcacgactataagttgtcggtgttatccaaagtcattctggaacacattggcataagcattgttgcatgaatagatattcagcacatacttccttgatgtcctgacccatttggctggcacagagatgaacttaaagacaaacgtcttgatgcggcttgttgctttgagtccgaacctcttcacgtcaagcctcgccatgatgaatttatagaagttgcgtatgagtgccataagcagaagaaacaccgtgttttctcccataaaggattttggaagcctgttccagccgaatccgttattcatatcatcgaagatgcgttccttccctccacggaggttatagaattcgacaatctctttctcggaagactcgtagtcatttgtaaggatgcagcggtaggtgtattctccttcccacaggtcgagttcgccgtctatccgcttctgtctttgaatcacaagacggtatgccttccctttccatttctcgatgagaatggaggccagctcaaactcaatgccgcccaattccactttcttccaacctctgagggcaaagatgtcattgtagagcgaactgcatcggttagcacggatatagaaggtcttgcagtgtttagcaatctcttccactatctcttcagaacacgagccgcaatcagctctgaaacggttgataataagcttgttttgttcaaacctttcaaagaacctcttcagcgtgtccttctggtggaaacggacatttgtgttgccgtcgctgttctcaatgccgacaatcaagttgccaataaccgccacgccagggcgataaccaaggaacttcttgtatgtaggcttcgcatcaaacttctcagcctctatgaactggtggtcgaagtcaacgtcatacccctcgccctctttcagctgccctgtggacaataggcaattgaggagcagtgtattcagcttgtctgccgtgttgaagtcgtaggtcttgccagtgtcggatgtgtaggaaatgttatcctgggtcagttcctttatggctctaagaatcgtgtcggcactgcatgtgcgaagtgtcggatgaagcgaaaggtggtacatcagatgagtggtgacatcctcgatgcatgagccgccacaaaaataaacgctcataagcgaacggatgatttcgctgtattgataaccatacagcctgcatctcataccgagggttgagtcgattacagatgagagtctggagtcaaattgctccattattgaaaatattcctccaaaaggagtgagtttctcggatttaattgctacctttgccatgtctgtcgggtttgatacatattttgatttgcaacactaagataggtgaaaaatctgacatggcaaattcctgagcaactttttgttgctcaggtacttaaaaagttatatttgtaatagtgttgcggaattaaggttatcctatatttgtctcctataacgggtaagttacaggcgtttttgcgtcaaatgataataaatccaaagaattttcaaaaagatgttatatggcatgttttataatttggagagtatcagtaaaagcgactatatttgcaccgttatcctgaaaacaatctttttaccttaaaaaaaactaatacctattgaaaactgaaaaatggagctttgtgaaaagccccatttttttttgctcttcaccgaggtggcgaagccgcgttctacggtgtttcaaaaggggatacttcttcatttaattaactttttagcctttaaagaaccaatttgaagaacgagtttaaagaaccaacttgaagaaccgttttgaagaacgaggttatggaagagcagtatttttttaatgaagtacaagcaaggtttcatttgagaaagcctaaggcaaataagcctactaatatttatttggtatgtcgaataaatgggaagcaggttaaactctctacgggtgtaaaagtatatccagagcattggaatgaagaaaaacaagaagcatacattagttgtaggctatctgaacttgataatagtaataatactataactaatgaaaagttgacagaattaaaagcaagttttgtcgaatataaatactatctttgtcaacatcccaacgaaatggagcagggagtagaattgttacgaaagtttatatataaagatactatggtaaagaagcaagaaactgaaaatgctatacattggttacgcaatgctataattgctgataagaatataggtgaaagtacaagagctgattacataaagcaaataaagttctttgaaatatttttgaatgagacaggtagatgtcctatcagtttcagtgatataaacctacctttaattaagggatatgaactttatcttcttaataaagatgttggtaaaggtaaaacaacgaaaactactacggttggtaataaggtagagaagataatatgtattcttaaaagagcagagcagcaaggaatgattgatattcatgaatctaaccttgataaatataagaagcctagaagtaaagaaggtgatagcaatgatatatttcttacagaggaagagataagtaagatatatgctttggaactctctggcaaagaagaacaggtgagagatttgtttgttttgcaatgttggataggtcagcgttttacagatacacagtcaataaatgagggaataatgaaagataatggaaatataattgagattatccaagaaaagacaaagcataaggtgtctgtaccattattgccaatagctaaagagatactagccaagtacgaaaaccaatttcctatatttaccaatcagacggctttaaattatttgacaaagattggagaaaaggctggtataacaagattgcataccgtagtggagcaccgaggtgatgaagtaactaagaagcaagttcctgtttataaactgataaagactcatactgcaagacgttcatttatttgtaatatgttgttacgtggatttgacgctcatcttataatgaaaattacaggacataatgatgttgagtcttttcaaaaatatgttaagttaacatctaatgatgcagcgaatgtcattcttgaaaatgaagctaatcaaataaagtcatcaaagaaaacactaataacgaaagaaatcccgatagctaatgatgtgccaactgatatagaaggtattttaaattatgtatttgctttagataaggtgaatgagttatttccgctattaatgaaaggaatagatatatatggattagatgatgaaataaacgagcttatgtctattattaaggatagaaagagacttccaaaagttttggaaagagctaaagagttattttgtgatgatacaataaaagaggttgccattaataaactgttatgtgcacgtccaatgttagaacaaataggaaagctcaagaatgatgttacagcatatcaaatgtttattaataacttatcggaattagggatattggaattgaatattcctaagagtgcggatgtgaaggactactacaatgaattacctaatatggtagatgtacttgataaaatagaattgtaagataagagcgaaatggtaatattgaaatagagttcgtctaatcgctaaatgaactttttcactatatgaatacttctagtcgattttttcagtttgtggtactagtattaggtcactccctaaaaacttagtacctttgtatcaatatattacaaatagtatataagataacacaggcacaaaagatacactattttatcaccattttttatttaaaacactactatgcaaacattcacctatgaagaaatcagagaaaaagcattaaaacaaggagtaacagataacaggcttagagttggcttatgggctagctcaaatggttatattaaaagcaagagaaagatacaagggaaagtatatacgatttattttgcaccacaacattaattagattcagatacatcattaataaaataaaccaatgacctatgattattcatattcctacgggaaagcgattcaataatcgaaaagaagcaaagatttactttggtagtgcttattactacaagatagaaaaagagaagaaagatttactatttataaacaatattcaatccgctactaatgaatattctaccccaattttgcagaagcaatgcaaccgtcaactattccattctaaatagattcaaacctgccaatatttatagatttttctgtttgtctctttcaagagatgattggtataatgtgagaatcactttagatgaattaaaaagaacaagtggaggtaaatcagtaagcagttttaataagaaatttgaggagtacttggatataaagccttattttgtggataatggttattattatctaactagacggaatatttatcatattcctgcaatggaagaacaatgtatcactatctccaataagtttgcattaatcgaactggatgcagcaataaaaggcttctttatccaattactactattatctcgatgtggcaatgttgaattgacaaaagctaatatattgaaagcgataaaaattgacgaagacacttatgagaaatatataatagagctggcagttgttgatttactattgtttggcaatcctttaatcttacatactgaaaatattctattggaaaacgacttttccaagcagaaaaaactgcccacgaagaaagtaaataaaatagtagagatagatgataatggaaatatcataattcccaagtaaggagaaaaagtgttctttattaatatattaatatacagtactttttcccctgtacctacctgttttatagaataagatgcaataaaagtgattttttctgtgtaaggcaaagtgcagtgttattattagtattacaagccattcttagctttacataggtaaggtagtggggaaaaagtatctaatattaattatatattataacacacattttcccccactactaaagaatctaaactttatgtgcgcatgaacttcattttttagggtgacagagtatctgttctgatttttaaagattaagagttatataggctaatcctgcacttgaagtatgagacactgaaaaatatgtcaatgcccacaaataagctcattatagagactttgacgaataaattagtctactcccaactaaaaacaaaaatagccgcaagcgagtacacttacaaatgtgctcaactgcggctttttttgtggaacttctaaattcctgtctaatacaagggatatagcagttcgcaattttaaatatgggagttaattttcccaatggaagtgtgggaaaatgcaaatatgacctgtttgatttacatataattcaaggagttgaaccattgacaaacaggtagttcttgatttttaagaatactcaaagttactcataataaacaaggtaaaaaaataaacaatactcaatttctaatattactacttagcatatctttatatggcagtataatactctcctttctattatagtgcatagtaatacataagcacgcaataaagtataggtacttatatataataccccctacctataaaaataggagcttaaatatatatcagcttacttctcctatgatttacagaattgaaagttacatgagcgcatgaacagtagttctaacaaccccctagggtagttggaagaaaagtgaaatatctattctccacgtaatcaatttataaatcatttaaaattttattcgttatgagaaatctacaaattattggcaatgtgccacaagtaagaagggaaagtaactttggtgaatatgcagaagaagcggtaataatcgaagaacaaccaaaagttaaaaaagagaatcctcatttcttggaagctaatacactagaggtaacaatgcaacatttgaaagaagattgtattacacccgtatttgccaaagataatgagcttacaattcctcatcctgcatttattgatactgtttatgacgctgcaaatacatttttcagtggtgaaagtattgataagcccgatattcgtgtaagtcacattatcaaggggagaataccagaggcaatacataaacctgcaaatcaacttcttgaaagtgataagactatctactacgaaagatgtgcttttattattcagattcctacgatttacgaaacggtgaacgggaataagttaatattaactattggtggtgttcgtgcttataatcacactaatctttattcaaagaaaggagcagaacgctttaaagtgtttattggctttacttgtaaagtttgtacaaacttgtgtgtatcaacagatggttttcttagttgtttggaagttactaatactaaagatttatatcaagcagtattggaaatgtttcagagttaccaacctgcaaaacatctacacttaatgcaaacacttggtaactcatatctcacagaacatcaattttgccaattacttggaagaatgagacttggtcaatcattaccacaaggttatcaaaaagatattcctaaaatgcttatcactgattcacaaataaatacagttgcaaaagcatatatcaatgataagaactttgggagcttggggaatgatattagtatgtggaaattgtacaatctattgacaggagcaaacaagagcagttatatagattcattcttggatagagcggtaaacgcaaccgaaatagcaacgggaataaatgccgctttgcatggagacactaaatataagtggtttattgattgattaaacaggggaatattcagaaatgggtattctcctattttattaactacgtaaaacaaagaatcatgttttattataaaatacttgtttggctcttttttgtggtattggctatgattagtgcgtgtgtgccgttgatatggcttgtgatttttataggtttatgggatattgaggaagcgaataaacctcgttagtgttcaaaacaggaatgtgttcaaataaatctgcaaaggtggtttgaacacattctttcatgttatcaatttaatcaaagaataaaatgaaaacagccgtaatatacgctcgtgtttcgtcaagtaatgacagacaggacacgagcagacaaatagaggatttaaagaaatatgctatttcacaggatatagaaatagtgaatatattccaggagcatatttcaggtgcaaagaaaatagaggaaagacagattttaggagaatgtttggaatactgtaaacgtgaatctgtggatattctacttttgtctgaattgtcaagactaggaagaagtacattacaggttcttcgctctttggatatattgcatgaatcgaaagtatcggtttacatacagaacttgggcttatatactttgcaaccaaatggggaagttaatccaatagcttctatcatggtgacagtacttgcagaaatggcaaatatcgaaagaagcaatatccaatatcgtttgaatagtggtagagcgaattatattgctaaaggtggcaagcttggcagaaagacaggttcaaccaaaacggatgataagaaaaaagaagaatataaggaagtcattgctttactaagaaaaggctattcaatcagaaatatagctaagctacaaagtattggtatttccaccgttcaacggataaaaaatcagtttataaagccataagcataaaatatcggtggggtggaaaaattcagagatttagtttttatatgggtggtcttgaatttttccactaccataaatttataaagcagaaatagccctcaatttttaataaacaatagttcttgctattacaaacgcttttcgtaactttgtggcaatttcagatacctaatgtgttaggtctgaaaggacatattacgaaaggtgttattgaaattatcttccattctcaaatctcgcaaatttgaacaaaggtacgaagatgatagcaatagcaccacaccatttgatatatacctaccttatatctttaaggctttagatattgtcaatattggtgtgggctattgttttatccgtaccaaaggcaatgcgagagccagagaatgagataagacaatacgttccacaccttttttattgtataacagtatctaaagggacaggatgcataaaacgaataactacgaatcagacattaagaaacaacttttgctactatcttttaagtagccaactcattttttgagcagcttatactacaaattaaattattaatcaaaaaataaaaagcaatatgaaaaaactatttattggattatcctttatattttcgtttatactattttcctgtaataacatccaaagtaatcaaagagtagatgataaggaagaacaaaaacaaacgacaacaaaagaagaagtgcgtaataatatagcaaaatatcttgtgattgaacgtgaagagcctcagcctgttggaagcgcagtaagattgaacaacaagaaagagaatgtttttcaagctactttttttgatatttccgttttctctgcattgttagcacaatggggagttaaaccacccacatattgggttttgaagaattattcggattttactatagataaggttgtcatggaatatgttgatacagaaggaaatgtacaagtattgaccgaaacttttttagcaggaaataccaaaaggcagttgattgatgtaaacaaaggtggaaagccatacataattactataaaaagtaaagctctagatttataaatacaagacaatatggaaagaaaaatagtattagcaatatttgcacctgcacttgttgcattggcaatgagaatagcactttttgtattggcacttcctatttttggtattgcgtttatagaaccatcttttcaatatgatgcagaagaacttgcaggattcaatatgtttatatgggatgaatcatggctatactggatattggttttattgggaacattctatgttgaaatgaaaatttttaatgattaattcgttctttatatggtaaaatatatatttttatttgtctttgcactatttacgaatattggaataatggctcaatctccacagtcccctaaaagaactgtcttagattttacgcctaaagttccgcaagaagtcattaaccttgcattggaaagagttaaacagaaagaagttgcttgttttaataatggagcaattcaaaaaaagaagtataagattataaattatactacttcagtagctgttgatatgaaatataatgtttgggtagaagtcgttgacccttgtaatgatattgctaagaaactttggattcaatataaaaaaattaaggagggacagtacgtttgcacaaaagatactttttatactagtaaatattaactaaatcttatgggagtagtaataggaattgtaatttatgcaataatagcatatattacctgtccacgtaaagaaaatgggagttttgaagagggtgcggtagtaatgtatattatcgttcctgttgtggttttggcgatttatcttatatgtaataattgattattttatagagaatagtattattcatgaagaatatatatgcgatttacatattactattaatgctattactatcttgtactagtaaaaaggatagtaatatacaggctactattgacagtttatttatatatgacaatcatcctactttggaaatatcagaagctaaatatttgcaatgggtagattcggtattaggagtaaaaggtgtgaaactgattgattatagaaatgggatataccaatatgatgatacaaggttttattggaatagaacttttgattatttcttagtatatccctctagctttacacatggagaagaatcagatttaggcaatggaaatcatttcgtaaatgaagatagtacaatctgtttgaatgtgtatgctacttacttcgatgtttttaaagatgattattcgcttcatgaatggtttgatataatgattgatacagaagtagaacaaggcaatagaattgtcaagaaagatattacagaccatagttatactattgaaggtaatactaagggtggtagatgtttttatagtaaagctactcataaaaaagcttatgaacgtgagattattgtaacagtgaaattgaagtatacagattcaagaagaaaagaggtagagaaacttttaccaaatatattcaaatatgtctaaacaaatgagttataaaaaacaatggtgctacgaattgaagatatatctttcattggtgtatatgtaaatgatagctttagagactttaaagatataaatgattatgccaattatcatgtatcattactaaacaataaaagatatcaagcttttagtggtggagattttattgatagagtagttaaaggtggatatgctactgaccctaattataagagagcattatctaatgtatataatcagatagctaaagcccaagaaggaatgaagattcctaaattaaagggggcaggagagttaaaagccagaatattaagacagttcaatagagaaaaagctgccaacagaaatgaagaacaattaattggcttcgattggagtagatataaatctaataaacctaagccagaaactacacctactcaaagtgagcagttagagaatggcggtgttattaaagcacatgacggaatagtaactcaagctattaataaagttaagagttttcttcctaaaaaagaacctaaggaacctattaatgttgtagatgttgctaaagaatatgctcctagtgctgttgcttctatgcttcttggtaatgtaaatccaattataggacaaatactaggattaaatcagaatatagatttaactaaagctcctcctagtttagaaaaagttaatactaatatgtggaagtttgaaaatcctaaaaataaaggattaagaggtaatttatattatccatttaaaactgcaaacggaaacactgatataggtccaggatatgacttagatatgcaaacagcagagtttaaaaagaaagcagcaaatggaatgactaaagaagaacttgatgcaataatgcttgagaggcttagaaaagaaattccacacttagatgcaaaattaaacagtgtaaccaataataatgctgatactattagtccacaaattaaagaaggattattagatatgtattggcaattgaagaatggattatacgattatgataacttatttgaaggtatagctaaagga
